(19) United States
(12) Patent Application Publication
(10) Pub. No.: US 2009/0054319 A1
(43) Pub. Date: Feb. 26, 2009

(54) Methods and Compositions for the Treatment of Hypertension and Gastrointestinal Disorders

(75) Inventors: John Jeffrey Talley, Somerville, MA (US); Mark G. Currie, Sterling, MA (US); Shannon Roberts, Cambridge, MA (US)

Correspondence Address: FISH & RICHARDSON PC, P.O. BOX 1022, MINNEAPOLIS, MN, 55440-1022, US

(73) Assignee: MICROBIA, INC., Cambridge, MA (US)

(21) Appl. No.: 11/908,667

(22) PCT Filed: Mar. 17, 2006
(86) PCT No.: PCT/US06/09696

§ 371 Date: May 15, 2008

Related U.S. Application Data
(60) Provisional application No. 60/662,946, filed on Mar. 17, 2005.
(60) Provisional application No. 60/701,258, filed on Jul. 21, 2005.

(51) Int. Cl. A61K 38/00; A61P 1/00

(52) U.S. Cl. 514/12; 514/14

(57) ABSTRACT

The use of guanylin potentiating agents for treating various disorders, including hypertension as well as IBS and other gastrointestinal disorders and conditions (e.g., gastrointestinal motility disorders, chronic intestinal pseudo-obstruction, colonic pseudo-obstruction, Crohn's disease, duodenogastric reflux, dyspepsia, functional dyspepsia, nonulcer dyspepsia, a functional gastrointestinal disorder, functional heartburn, gastroesophageal reflux disease (GERD), gastroparesis, inflammatory bowel disease, irritable bowel syndrome, post-operative ileus, ulcerative colitis, chronic constipation, and disorders and conditions associated with constipation is described.

[0001] This application is the National Stage of International Application No. PCT/US2006/009696, filed on Mar. 17, 2006, which claims the priority to U.S. provisional Application Ser. No. 60/662,946, filed on Mar. 17, 2005 and Ser. No. 60/701,258, filed on Jul. 21, 2005. The contents of all applications are hereby incorporated by reference in their entireties.

### BACKGROUND

[0002] Irritable bowel syndrome (IBS) is a common chronic disorder of the intestine that affects 20 to 60 million individuals in the United States alone (Lehman Brothers, Global Healthcare-Irritable Bowel Syndrome Industry Update, September 1999). IBS is the most common disorder diagnosed by gastroenterologists (28% of patients examined) and accounts for 12% of visits to primary care physicians (Camilleri 2001 Gastroenterology 120:652-668). In the United States, the economic impact of IBS is estimated at $25 billion annually, through direct costs of health care use and indirect costs of absenteeism from work (Talley 1995 Gastroenterology 109:1736-1741). Patients with IBS have three times more absenteeism from work and report a reduced quality of life. Sufferers may be unable or unwilling to attend social events, maintain employment, or travel even short distances (Drossman 1993 Dig Dis Sci 38:1569-1580). There is a tremendous unmet medical need in this population since few options exist to treat IBS.

[0003] Patients with IBS suffer from abdominal pain and a disturbed bowel pattern. Three subgroups of IBS patients have been defined based on the predominant bowel habit: constipation-predominant (c-IBS), diarrhea-predominant (d-IBS) or alternating between the two (a-IBS). Estimates of individuals who suffer from c-IBS range from 20-50% of the IBS patients with 30% frequently cited. In contrast to the other two subgroups that have a similar gender ratio, c-IBS is more common in women (ratio of 3:1) (Talley et al. 1995 Am J Epidemiol 142:76-83).

[0004] The definition of and diagnostic criteria for IBS have been formalized in the “Rome Criteria” (Drossman et al. 1999 Gut 45:Suppl II:1-81), which are well accepted in clinical practice. Briefly, the criteria specify that for at least 12 weeks (consecutive or non-consecutive) in the preceding 12 months of abdominal discomfort or pain at least two of the following three features must occur: (1) relieved with defecation, (2) onset associated with a change in frequency of stool, and (3) onset associated with a change in form (appearance) of stool. The Rome II criteria also state that the symptoms that cumulatively support the diagnosis of irritable bowel syndrome include: abnormal stool frequency (“abnormal” may be defined as greater than 3 bowel movements per day and less than 3 bowel movements per week), abnormal stool form (lumpy/hard or loose/watery stool), abnormal stool passage (straining, urgency, or feeling of incomplete evacuation), passage of mucus, and bloating or feeling of abdominal distension.

[0005] However, the complexity of symptoms has not been explained by anatomical abnormalities or metabolic changes. This has led to the classification of IBS as a functional GI disorder, which is diagnosed on the basis of the Rome criteria and limited evaluation to exclude organic disease (Ringel et al. 2001 Annu Rev Med 52: 319-338). IBS is considered to be a “biopsychosocial” disorder resulting from a combination of three interacting mechanisms: altered bowel motility, an increased sensitivity of the intestine or colon to pain stimuli (visceral sensitivity) and psychosocial factors (Camilleri 2001 Gastroenterology 120:652-668). Recently, there has been increasing evidence for a role of inflammation in the etiology of IBS. Reports indicate that subsets of IBS patients have small but significant increases in colonic inflammatory and mast cells, increased inducible nitric oxide (NO) and synthase (iNOS) and altered expression of inflammatory cytokines (reviewed by Talley 2000, Medscape Coverage of DDW Week).

[0006] Hypertension is a major risk factor for cardiovascular disease, the leading cause of death for both men and women in many industrialized countries. Almost one third of the adults in North America and 44% of the adults in Europe suffer from hypertension. The Seventh Report of the Joint National Committee on Prevention, Detection, Evaluation, and Treatment of High Blood Pressure (JNC 7) defines Stage I Hypertension as systolic blood pressure (SBP) of 140-159 mm Hg, or diastolic blood pressure (DBP) of 90-99 mmHg.

[0007] Blood pressure is a function of: the force/amount of blood the heart pumps, the diameter of arteries, and the volume of blood in the bloodstream. Generally speaking, blood pressure can be lowered by: (1) decreasing the blood volume, (2) increasing the diameter of arteries by decreasing vasoconstriction or increasing vasodilation, or (3) decreasing force of blood pumped by the heart.

[0008] The Renin-Angiotensin-Aldosterone Pathway (RAAS) plays a role in many aspects of blood pressure regulation. Many of the currently available blood pressure drugs affect the RAAS pathway. Most current therapies for hypertension fall into one of the following classes: (1) diuretics, (2) ACE inhibitors (ACEI), (3) Angiotensin Receptor Blockers (ARBs), (4) beta-blockers (BB), and (5) calcium channel blockers (CCBs).

[0009] About 63% of patients with hypertension require treatment with at least two antihypertensive drugs. Currently prescribed drug combinations include: ACEIs and CCBs; ACEIs and diuretics; ARBs and diuretics; BBs and diuretics; centrally acting drugs and diuretics; and two different diuretics. Sufficient reduction in hypertension can lead to reduced risk of stroke, reduce risk of myocardial infarction, reduced risk of heart failure and overall reduced risk of death.

[0010] Guanylin is an intestinal peptide that stimulates chloride secretion. In humans, guanylin is produced initially as a 115 amino acid protein referred to as preproguanylin. The mature protein, which is believed to be the active form, has 15 amino acids. Guanylin is inactivated by cleavage by the serine protease, chymotrypsin, which is present in the gastrointestinal tract, and by a chymotrypsin-like enzyme that is present in the kidney. Guanylin is an agonist of the transmembrane guanylate cyclase (GC-C) receptor. The GC-C receptor is present on the apical plasma membrane of enterocytes in intestinal tract and in other epithelia. Activation of the GC-C receptor by guanylin in the intestine increases cGMP levels. This increase in cGMP is believed to cause a decrease in water and sodium absorption and an increase in chloride and potassium ion secretion, leading to changes in intestinal fluid and electrolyte transport and increased intestinal motility. The intestinal GC-C receptor possesses an extracellular ligand binding region, a transmembrane region, an intracellular protein kinase-like region and a cyclase catalytic domain. Proposed functions for the GC-C receptor are fluid and electrolyte homeostasis, the regulation of epithelial cell proliferation and the induction of apoptosis (Shailubhai 2002 Curr Opin Drug Dis Devel 5:261-268). Other GC-C receptor agonists (GC-C agonists) include uroguanylin, renoguanylin, lymphoguanylin and the E. coli heat stable ST peptide.

### SUMMARY

[0011] Compositions and related methods for treating IBS and other gastrointestinal disorders and conditions (e.g., gastrointestinal motility disorders, chronic intestinal pseudo-obstruction, colonic pseudo-obstruction, Crohn's disease, duodenogastric reflux, dyspepsia, functional dyspepsia, nonulcer dyspepsia, a functional gastrointestinal disorder, functional heartburn, gastroesophageal reflux disease (GERD), gastroparesis, inflammatory bowel disease, irritable bowel syndrome, post-operative ileus, ulcerative colitis, chronic constipation, and disorders and conditions associated with constipation (e.g. constipation associated with use of opiate pain killers, post-surgical constipation, and constipation associated with neuropathic disorders as well as other conditions and disorders) are described herein.

[0012] Also described herein are compositions and related methods for treating hypertension and/or reducing risk factors associated with hypertension (including: myocardial infarction, heart failure, and stroke).

[0013] The methods and compositions described herein relate to the administration of a chymotrypsin inhibitor, an inhibitor of a chymotrypsin-like enzyme, a prodrug of a chymotrypsin inhibitor, a prodrug of an inhibitor of a chymotrypsin-like enzyme, an antibody directed against chymotrypsin, and/or an antibody directed against a chymotrypsin-like enzyme.

[0014] Inhibitors of chymotrypsin and inhibitors of a chymotrypsin-like enzyme are useful in the methods and compositions described herein. Such inhibitors can inhibit the activity of chymotrypsin or a chymotrypsin-like enzyme, e.g., in the intestine, kidney or elsewhere in the body, and thereby interfere with the inactivation of guanylin by proteolytic cleavage. In this manner, the inhibitors are expected to potentiate the activity of guanylin present in the body whether the guanylin is produced by or administered to the patient.

[0015] The prodrugs of inhibitors can be metabolized to active inhibitors. In some instances the administered prodrug itself has some or considerable inhibitory activity. Some compounds that are inhibitors of a chymotrypsin-like enzyme will also have the ability to inhibit the activity of chymotrypsin. Because the inhibitors decrease the activity of chymotrypsin and/or chymotrypsin-like enzymes, they can interfere with inactivation of guanylin in the intestinal tract caused by chymotrypsin cleavage of guanylin, inactivation of guanylin in the kidney caused by a chymotrypsin-like enzyme cleavage of guanylin, and/or inactivation of guanylin caused by cleavage by chymotrypsin or a chymotrypsin-like enzyme elsewhere in the body. The inhibitors, whether administered directly or as a prodrug that is metabolized to an inhibitor, can potentiate the action of naturally-occurring guanylin or other GC-C receptor agonist (whether endogenous or administered), thereby increasing or regularizing intestinal motility, reducing hypertension, or increasing GC-C receptor activity. The prodrugs can also be used in combination therapy, for example in combination with a GC-C receptor agonist or some other treatment for a gastrointestinal disorder. In certain embodiments, the GC-C receptor agonist is guanylin or a biologically active variant or fragment thereof.

[0016] Antibodies directed against chymotrypsin or a chymotrypsin-like enzyme can be used in any of the methods and compositions described herein in which an inhibitor of chymotrypsin or a chymotrypsin-like enzyme or a prodrug of an inhibitor of chymotrypsin or a chymotrypsin-like enzyme can be used. The antibodies can inhibit the activity of chymotrypsin or a chymotrypsin-like enzyme and thereby interfere with the inactivation of guanylin by proteolytic cleavage.

[0017] Inhibitors of chymotrypsin, inhibitors of a chymotrypsin like enzyme, prodrugs of a chymotrypsin inhibitor, prodrugs of an inhibitor of a chymotrypsin-like enzyme, antibodies directed against chymotrypsin, and antibodies directed against a chymotrypsin-like enzyme are collectively referred to as “guanylin potentiating agents”.

[0018] The various compositions described herein can also be used for treating obesity, congestive heart failure and benign prostatic hyperplasia (BPH).

[0019] Without being bound by any particular theory, in the case of IBS and other gastrointestinal disorders the compositions described herein are useful because they can increase or regularize gastrointestinal motility, decrease inflammation, and/or decrease gastrointestinal pain or visceral pain by potentiating guanylin activity.

[0020] Without being bound by any particular theory, in the case of hypertension the compositions described herein are useful because they are expected to prevent proteolytic inactivation of guanylin in the kidney, resulting in higher renal levels of guanylin, which will act to increase electrolyte and fluid secretion into urine, resulting in lower blood volume and consequently lower blood pressure. In addition, increased renal guanylin levels might lead to increased plasma guanylin levels which may reduce release of aldosterone, a regulator of blood pressure.

[0021] Pharmaceutical compositions comprising certain compounds that are capable of reducing the activity of chymotrypsin or a chymotrypsin-like enzyme, particularly the ability of chymotrypsin or a chymotrypsin-like enzyme to inactivate guanylin by proteolytic cleavage are described herein. Also described herein are pharmaceutical compositions comprising a chymotrypsin inhibitor or a prodrug of an inhibitor of a chymotrypsin-like enzyme as well as combination compositions comprising a chymotrypsin inhibitor or an inhibitor of a chymotrypsin-like enzyme and a second therapeutic agent. Pharmaceutical compositions comprising a prodrug of a chymotrypsin inhibitor and a chymotrypsin inhibitor as well as combination compositions comprising a prodrug of a chymotrypsin inhibitor, a chymotrypsin inhibitor and an additional therapeutic agent (e.g, guanylin) are described as are pharmaceutical compositions comprising a prodrug of an inhibitor of a chymotrypsin-like enzymes and an inhibitor of a chymotrypsin-like enzyme. Also described are compositions comprising a prodrug of an inhibitor of a chymotrypsin-like enzyme, an inhibitor of a chymotrypsin-like enzyme and an additional therapeutic agent. In addition, a prodrug of a chymotrypsin inhibitor and a prodrug of an inhibitor of a chymotrypsin-like enzyme can be used in combination with or without an additional therapeutic agent. Also described are pharmaceutical compositions comprising an antibody directed against chymotrypsin or a chymotrypsin-like enzyme and, optionally, a second therapeutic agent, e.g., guanylin, a guanylin variant, or an analgesic agent.

[0022] Methods for treating other disorders such as congestive heart failure and benign prostatic hyperplasia by administering a guanylin potentiating agent are described. Such agents can be used in combination with natriuretic peptides (e.g., atrial natriuretic peptide, brain natriuretic peptide or C-type natriuretic peptide), a diuretic, or an inhibitor of angiotensin converting enzyme or an inhibitor of vasopressin.

[0023] Methods and compositions for increasing intestinal motility by administering a composition comprising a guanylin potentiating agent are described herein. Intestinal motility involves spontaneous coordinated distensions and contractions of the stomach, intestines, colon and rectum to move food through the gastrointestinal tract during the digestive process.

[0024] For the treatment of gastrointestinal disorders, the agent can be administered orally, by rectal suppository or parenterally.

[0025] In various embodiments, the patient is suffering from a gastrointestinal disorder; the patient is suffering from a disorder selected from the group consisting of: a gastrointestinal motility disorder, chronic intestinal pseudo-obstruction, colonic pseudo-obstruction, Crohn's disease, duodenogastric reflux, dyspepsia, functional dyspepsia, nonulcer dyspepsia, a functional gastrointestinal disorder, functional heartburn, gastroesophageal reflux disease (GERD), gastroparesis, inflammatory bowel disease, irritable bowel syndrome, post-operative ileus, ulcerative colitis, chronic constipation, hypertension, obesity, congestive heart failure, or benign prostatic hyperplasia.

[0026] In another aspect, the invention features a method for treating a patient suffering from constipation, the method comprising administering a composition comprising, consisting essentially of, or consisting of a guanylin potentiating agent and a pharmaceutically acceptable carrier. Clinically accepted criteria that define constipation include from the frequency of bowel movements, the consistency of feces and the ease of bowel movement. One common definition of constipation is less than three bowel movements per week. Other definitions include abnormally hard stools or defecation that requires excessive straining (Schiller 2001 Aliment Pharmacol Ther 15:749-763). Constipation may be idiopathic (functional constipation or slow transit constipation) or secondary to other causes including neurologic, metabolic or endocrine disorders. These disorders include diabetes mellitus, hypothyroidism, hyperthyroidism, hypocalcaemia, Multiple sclerosis, Parkinson's disease, spinal cord lesions, Neurofibromatosis, autonomic neuropathy, Chagas disease, Hirschsprung disease and cystic fibrosis. Constipation may also be the result of surgery or due to the use of drugs such as analgesics (like opioids), antihypertensives, anticonvulsants, antidepressants, antispasmodics and antipsychotics.

[0027] In various embodiments, the constipation is associated with use of a therapeutic agent; the constipation is associated with a neuropathic disorder; the constipation is post-surgical constipation (postoperative ileus); the constipation is associated with a gastrointestinal disorder; the constipation is idiopathic (functional constipation or slow transit constipation); the constipation is spinal chord injury induced; the constipation is thyroid disease related; the constipation is associated with neuropathic, metabolic or endocrine disorder (e.g., diabetes mellitus, hypothyroidism, hyperthyroidism, hypocalcaemia, Multiple Sclerosis, Parkinson's disease, spinal cord lesions, neurofibromatosis, autonomic neuropathy, Chagas disease, Hirschsprung disease or cystic fibrosis), surgery, the use of drugs such as analgesics (e.g., opioids), antihypertensives, anticonvulsants, antidepressants, antispasmodics and antipsychotics.

[0028] A method for treating a patient suffering from a gastrointestinal disorder is described. The method comprises administering a composition comprising, consisting essentially of, or consisting of a guanylin potentiating agent and a pharmaceutically acceptable carrier.

[0029] In various embodiments, the patient is suffering from a gastrointestinal disorder; the patient is suffering from a disorder selected from the group consisting of: a gastrointestinal motility disorder, chronic intestinal pseudo-obstruction, colonic pseudo-obstruction, Crohn's disease, duodenogastric reflux, dyspepsia, functional dyspepsia, nonulcer dyspepsia, a functional gastrointestinal disorder, functional heartburn, gastroesophageal reflux disease (GERD), gastroparesis, inflammatory bowel disease, irritable bowel syndrome, post-operative ileus, ulcerative colitis, chronic constipation, obesity, congestive heart failure, or benign prostatic hyperplasia.

[0030] A method for increasing gastrointestinal motility in a patient is described. The method comprises administering to the patient a composition comprising, consisting essentially of, or consisting of a guanylin potentiating agent and a pharmaceutically acceptable carrier.

[0031] A method for decreasing gastrointestinal pain or visceral pain in a patient is described. The method comprises administering to the patient a composition comprising, consisting essentially of, or consisting of a guanylin potentiating agent and a pharmaceutically acceptable carrier.

[0032] A method for treating hypertension is described. The method comprises: administering to the patient a pharmaceutical composition comprising, consisting essentially of, or consisting of a guanylin potentiating agent and a pharmaceutically acceptable carrier. The composition can be administered in combination with another agent for treatment of hypertension, for example, a diuretic, an ACE inhibitor, an angiotensin receptor blocker, a beta-blocker, and a calcium channel blocker.

[0033] A method for increasing the activity of an intestinal guanylate cyclase (GC-C) receptor in a patient is described. The method comprises administering to the patient a composition comprising, consisting essentially of, or consisting of a guanylin potentiating agent and a pharmaceutically acceptable carrier.

[0034] A method for increasing the level of cGMP in a patient is described. The method comprises administering to the patient a composition comprising, consisting essentially of, or consisting of a guanylin potentiating agent and a pharmaceutically acceptable carrier.

[0035] A method for treating a disorder ameliorated by increasing cGMP levels is described. The method comprises administering a composition comprising, consisting essentially of, or consisting of a guanylin potentiating agent and a pharmaceutically acceptable carrier.

[0036] A pharmaceutical composition comprising, consisting essentially of, or consisting of a guanylin potentiating agent and a pharmaceutically acceptable carrier is described. The composition can include a polymer that controls the release of the inhibitor. The composition can include a second agent, e.g., a GC-C receptor agonist such as guanylin or a biologically active variant or fragment thereof.

[0037] A method for treating obesity is described. The method comprises administering a pharmaceutical composition comprising, consisting essentially of, or consisting of a guanylin potentiating agent and a pharmaceutically acceptable carrier is described. The composition can be administered in combination with another agent for treatment of obesity.

[0038] A method for treating congestive heart failure is described. The method comprises: administering to the patient a pharmaceutical composition comprising, consisting essentially of, or consisting of a guanylin potentiating agent and a pharmaceutically acceptable carrier. The composition can be administered in combination with another agent for treatment of congestive heart failure, for example, a natriuretic peptide such as atrial natriuretic peptide, brain natriuretic peptide or C-type natriuretic peptide, a diuretic, or an inhibitor of angiotensin converting enzyme.

[0039] A method for treating benign prostatic hyperplasia is described. The method comprises: administering to the patient a pharmaceutical composition comprising, consisting essentially of, or consisting of a guanylin potentiating agent and a pharmaceutically acceptable carrier. The composition can be administered in combination with another agent for treatment of BPH, for example, a 5-alpha reductase inhibitor (e.g., finasteride) or an alpha adrenergic inhibitor (e.g., doxazosine).

[0040] A method for treating secondary hyperglycemias in connection with pancreatic diseases (chronic pancreatitis, pancreasectomy, hemochromatosis) or endocrine diseases (acromegaly, Cushing's syndrome, pheochromocytoma or hyperthyreosis), drug-induced hyperglycemias (benzothiadiazine saluretics, diazoxide or glucocorticoids), pathologic glucose tolerance, hyperglycemias, dyslipoproteinemias, adiposity, hyperlipoproteinemias and/or hypotensions is described. The method comprises: administering to the patient a pharmaceutical composition comprising, consisting essentially of, or consisting of a guanylin potentiating agent and a pharmaceutically acceptable carrier.

[0041] A guanylin potentiating agent can be administered in combination with guanylin (including mature or immature guanylin, e.g., guanylin having a pre-sequence, a pro-sequence or both a pre-sequence and a pro-sequence) or a biologically active fragment or variant thereof. A number of guanylin and variants thereof are depicted in FIGS. 3-5. Also useful are guanylin related polypeptides comprising, consisting of, or consisting essentially of the amino acid sequence: Xaa₁ Xaa₂ Xaa₃ Cys₄ Xaa₅ Xaa₆ Xaa₇ Xaa₈ Xaa₉ Xaa₁₀ Xaa₁₁ Cys₁₂ Xaa₁₃ Xaa₁₄ Xaa₁₅ Xaa₁₆ (SEQ ID NO:1) wherein:

Xaa₁ is Ser, Asn, Tyr, Ala, Gln, Pro, Lys, Gly, or Thr, or is missing;
Xaa₂ is His, Asp, Glu, Ala, Ser, Asn, Gly, or is missing;

### Xaa₃ is Thr, Asp, Ser, Glu, Pro, Val or Leu;

### Xaa₅ is Asp, Ile or Glu;

### Xaa₆ is Ile, Trp or Leu;

### Xaa₇ is Cys, Ser, or Tyr;

[0042] Xaa₈ is Ala, Val, Thr, Ile, Met or is missing;
Xaa₉ is a) any amino acid, b) Phe, Tyr, Asn, Trp, c) an amino acid other than Phe, Trp, or Tyr, d) non-aromatic amino acid or e) is missing;

### Xaa₁₀ is Ala, Val, Met, Thr or Ile;

### Xaa₁₁ is Ala or Val;

### Xaa₁₃ is Ala or Thr;

### Xaa₁₄ is Gly, Ala or Ser;

[0043] Xaa₁₅ is Cys, Tyr or is missing; and
Xaa₁₆ is: a) any amino acid; c) is missing or d) His or Leu or Ser.

[0044] As noted above, immature guanylin can include a pre-sequence and/or a prosequence. Immature guanylin is processed to yield the mature protein. Immature guanylin generally includes a so-called “pre sequence” followed by a “pro sequence” and then the mature polypeptide sequence. The pre sequence is important for secretion of the polypeptides. The pro sequence may be important for proper folding of the mature protein under at least some conditions. Various pre sequences and pro sequences are discussed in great detail below in the section describing guanylin and guanylin variants.

[0045] The publications and patents referenced herein are incorporated by reference in their entirety.

### FIGURES

[0046] FIG. 1 shows the results of a T84 cGMP assay to assess guanylin activity after a chymotrypsin digestion assay. The chymotrypsin digestion assay was performed in the presence or absence of chymostatin.

[0047] FIG. 2 shows the results of LC/MS analysis of the processing of guanylin in a chymotrypsin digestion assay. The chymotrypsin digestion assay was performed in the presence or absence of chymostatin.

[0048] FIG. 3 depicts the amino acid sequence of various deletion variants of human guanylin in which one, two, three or four amino acids are deleted. The deleted amino acids are between the first and fourth cysteines in human guanylin as well as amino terminal to the first cysteine in human guanylin.

[0049] FIG. 4 depicts the amino acid sequence of various insertion variants of human guanylin in which one, two, three or four amino acids are inserted. The inserted amino acids are between the first and fourth cysteines in human guanylin as well as amino terminal to the first cysteine in human guanylin and carboxy terminal to the fourth cysteine in human guanylin.

[0050] FIG. 5 depicts the amino acid sequence of various guanylins and variants thereof.

[0051] FIG. 6 is a table depicting the sequences of various guanylin polypeptides, including pre sequences, pro sequences, prepro sequences, mature sequences and combinations thereof, SEQ ID NOs 4734-4852 respectively (across each row).

### DETAILED DESCRIPTION

[0052] Guanylin binds to and activates the guanylate cyclase (GC-C) receptor, a key regulator of fluid and electrolyte balance in the intestine and kidney. When stimulated, this receptor, which is located on the apical membrane of the intestinal epithelial surface, causes an increase in intestinal epithelial cyclic GMP (cGMP). This increase in cGMP is believed to cause a decrease in water and sodium absorption and an increase in chloride and potassium ion secretion, leading to changes in intestinal fluid and electrolyte transport and increased intestinal motility. The intestinal GC-C receptor possesses an extracellular ligand binding region, a transmembrane region, an intracellular protein kinase-like region and a cyclase catalytic domain. Proposed functions for the GC-C receptor are fluid and electrolyte homeostasis, the regulation of epithelial cell proliferation and the induction of apoptosis (Shailubhai 2002 Curr Opin Drug Dis Devel 5:261-268).

[0053] In the human body an inactive form of chymotrypsin, chymotrypsinogen is produced in the pancreas. When this inactive enzyme reaches the small intestine it is converted to active chymotrypsin by the excision of two di-peptides. Active chymotrypsin will cleave peptides at the peptide bond on the carboxy-terminal side of Trp, Tyr or Phe and can cleave a peptide at the peptide bond on the amino terminal side of a Leu, Ile or Val (and, at elevated pH, His). Thus, chymotrypsin can cleave guanylin as shown by Greenberg et al. (J Investig Med 45:276-82, 1997). Chymotrypsin-mediated inactivation of guanylin can be prevented by chymostatin, a chymotrypsin inhibitor. Santos-Neto et al (2003 Pharm & Toxicol 92:114) observed that chymostatin was required in order to observe guanylin-induced intestinal fluid secretion in the suckling mouse model.

### Chymotrypsin Inhibitors

[0054] A wide variety of peptide and non-peptide chymotrypsin inhibitors are known and can be used in the methods described herein. For example:
[0055] 1. tissue-factor-pathway inhibitor (TFPI) (Peterson et al 1996 Eur J Biochem 235:310-6; for examples see human (GENBANK® AAH15514 GI:15930156), mouse (GENBANK® AAH36146 GI:23271605), and dog (GENBANK® AAB32443 GI:833924));
[0056] 2. α-2 antiplasmin (Potempa et al. 1988 Science 241: 699-700, GENBANK® Accession P08697, GI:112907, SEQ ID MALLWGLLVLSWSCLQGPCSVFSPVSAMEPLGRQLTSGPN
[0057] 3. QEQVSPLTLLKLGNQEPGGQTALKSPPGVCSRDPTPEQTHRLARAMMAFTAD LFSLVAQTSTCPNLILSPLSVALALSHLALGAQNHTLQRLQQVLHAGSGPCLP HLLSRLCQDLGPGAFRLAARMYLQKGFPIKEDFLEQSEQLFGAKPVSLTGKQE DDLANINQWVKEATEGKIQEFLSGLPEDTVLLLLNAIHFQGFWRNKFDPSLTQ RDSFHLDEQFTVPVEMMQARTYPLRWFLLEQPEIQVAHFPFKNNMSFVVLVP THFEWNVSQVLANLSWDTLHPPLVWERPTKVRLPKLYLKHQMDLVATLSQL GLQELFQAPDLRGISEQSLVVSGVQHQSTLELSEVGVEAAAATSIAMSRMSLS SFSVNRPFLFFIFEDTTGLPLFVGSVRNPNPSAPRELKEQQDSPGNKDFLQSLK GFPRGDKLFGPDLKLVPPMEEDYPQFGSPK (SEQ ID NO:2);
[0058] 4. members of the serpin α-1 antichymotrypsin family (Forsyth et al. 2003 Genomics 81: 336-45; for example see CAS Registry No. 141176-92-3; functional variants thereof are described in European patent application EP1415664 and in Plotnick et al. 2003 Biochemistry 33:29927 (for example the P2 (Leu-357) variant);
[0059] 5. gelin (U.S. Pat. No. 5,397,694, partial sequence (aa 1-29) can be found at GENBANK® Accession AAB27871, GI:409493, (SEQ ID NO: 3) VDEKAEVTDGLCGDWTCSGAQVXQNDAAV), which has been proposed as a treatment for dermatitis as well a periodontitis and gingivitis;
[0060] 6. hirustasin (Sollner et al. 1994 Eur J Biochem. 219: 937-43, GENBANK® Accession No P80302, GI:461516, (SEQ ID NO 4) QGNTCGGETCSAAQVCLKGKCVCNEVHCRIRCKYGLKKD ENGCEYPCSCAKASQ);
[0061] 7. certain eglins including eglin C (GENBANK® Accession P01051, GI:124128, (SEQ ID NO. 5) TEFGSELKSFPEVVGKTVDQAREYFTLHYPQYDVYFLPEGSPVTLDLRYNRV RVFYNPGTNVVNHVPHVG) are peptide inhibitors of chymotrypsin. For other examples of eglins, see those disclosed in U.S. Pat. No. 5,180,667, U.S. Pat. No. 6,342,373, U.S. Pat. No. 4,636,489, Seemuller et al. 1981 Methods Enzymol. 804-816, Seemueller et al. 1986 Research Monographs in Cell and Tissue Physiology 337-59, Nick et al 1988 Adv in Experimental Medicine and Biology 240:83-8, and Schnebli et al 1986 Pulm. Emphysema Proteolysis (conference) CAN 107:228147 AN 1987:628147), which has been considered as a treatment for emphysema and for use as a non-steroidal anti-inflammatory agent;
[0062] 8. inhibitors from Bombyx mori (see, e.g., JP 4013698 A2 and JP 04013697 A2; CA registry No. 142628-93-1, (SEQ ID NO. 6) DEPTTKPFCEQAFGDCGTPY and CA registry No. 142628-94-2, (SEQ ID NO. 7) DKPTTEPFIC EQRFGNCGTG);
[0063] 9. the leech derived peptide thrombin inhibitor, hirudin (Zwilling 1968 Hoppe-Seyler's Zeitschrift fuer Physiologische Chemie 349:1787-8, CA Registry No. 8001-27-2, see for example, Genbank AAA01384 GI:269388, (SEQ ID NO. 8) ITYTDCTESGQNLCLCEGSNVCGKGNKClLGSQGKDNQCVTGEGTPKPQSHN QGDFEPIPEDAYDE). Hirudin variants are disclosed in the literature (for examples see those in U.S. Pat. No. 5,674,838, Great Britain patent application GB2242681 and those described in Wirsching et al 2003 Molecular Genetics and Metabolism 80:451-462);
[0064] 10. a shorter hirudin variant, hirulog/BG 8967 (CA Registry No. 128270-60-0, (SEQ ID NO. 9); FPRPGGGGNGDFEEIPEEYL; Angiomax® (bivalirudin)) may also have chymotrypsin inhibition activity and may thus be useful in the present invention along with other peptides disclosed in PCT publication WO04076484 and U.S. Pat. Nos. 5,196,404; and
[0065] 11. secretory leukocyte protease inhibitor (SLPI) (for examples see GENBANK® CAA28187 GI:758101 (human), GENBANK® NP_{—}445824.1 GI:16758102 (rat), and GENBANK® NP_{—}035544.1 GI:6755574 (mouse); also Farley et al 1997 Drugs and the Pharmaceutical Sciences 84:305-334.
[0066] 12. α-1 anti-trypsin which can inhibit elastase as well as chymotrypsin and thus may be useful in the present invention (for examples see GENBANK® CAB06092 GI:2780174 (human) and GENBANK® NP_{—}001009663 GI:57527135 (rat)). This product has been sold to treate α-1 anti-trypsin deficiency (a genetic disorder) as Zemaira™ (Aventis Behring; FDA biologics license 2003 License #1281), Prolastin® (Bayer), and Aralast™ (Baxter).

[0067] In addition, a large number of peptide inhibitors of chymotrypsin are reviewed by Schoofs et al. (2002 Curr Pharm Des. 8: 483-91) and by Salier et al. (1996 Biochem J. 315:1-9). McBride et al. 1996 J Mol Biol. 259: 819-27 and McBride et al. 2000 J Pept Sci. 6:446-52 disclose chymotrypsin inhibitors derived from combinatorial peptide libraries including those represented by CAS registry Nos. 306762-66-3, 306762-67-4, 306762-68-5, 306762-69-6, 306762-70-9, 306762-71-0, 306762-72-1, 306762-73-2, 306762-74-3, 306762-75-4, 178330-92-2, 178330-93-3, 178330-94-4, and 178330-95-5.

In addition, various small molecule inhibitors of chymotrypsin have been described including:
[0068] 1. the compound depicted below and described in EP 0071433 (CAS registry No. 81459-62-3)

[chemical structure]

Other chymotrypsin inhibitors disclosed in EP 0071433 include those specifically identified as chymotrypsin inhibitors on pages 11-16 of the application and those identified by CA registry Nos. 81459-79-2, 81460-01-7, 85476-59-1, 85476-62-6 (also known as FK-401 CA Index name 1H-Indole-3-acetic acid, 5-methoxy-2-methyl-, 4-[[2-[4-[2-(4-morpholinyl)ethyl]-1-piperazinyl]ethoxy]carbonyl]phenyl ester, trihydrochloride), 85476-63-7, 85476-67-1, 85476-70-6, 85858-66-8, 85858-68-0, 85858-69-1, 85858-70-4, 85858-71-5, 85858-72-6, 85858-73-7, 85858-75-9, 85858-77-1, 85858-79-3, 85858-81-7, 85858-83-9, 85858-84-0, 85858-85-1, 85858-87-3, 85858-89-5, 85858-90-8, 85858-92-0, 85879-03-4, 85879-05-6, 85879-06-7, and 85879-08-9);
[0069] 2. compounds with chymotrypsin inhibition activity described in JP 56092217 A2;
[0070] 3. compounds with chymotrypsin inhibition activity described in U.S. Pat. No. 4,755,383 (including, 1-Naphthaleneacetic acid, 4-[[4-(1-methylethyl)-1-piperazinyl]carbonyl]phenyl ester (CA registry No. 90186-24-6), Acetic acid, 9H-fluoren-9-ylidene-, 4-[[4-(1-methylethyl)-1-piperazinyl]carbonyl]phenyl ester (CA registry No. 90185-93-6), 1-Naphthalenecarboxylic acid, 1,2,3,4-tetrahydro-4-[[4-(1-methylethyl)-1-piperazinyl]carbonyl]phenyl ester, monomethanesulfonate (CA registry No. 89703-10-6), 1-Naphthalenecarboxylic acid, 1,2,3,4-tetrahydro-, 4-[(4-cyclohexyl-1-piperazinyl)carbonyl]phenyl ester (CA registry No. 85858-74-8), and 1-isopropyl-4-[4-(1,2,3,4-tetrahydronaphthoyloxy) benzoyl]piperazine methanesulfonate).
[0071] 4. chymotrypsin inhibitors described in U.S. Pat. Nos. 4,755,383 and 4,639,435 include those of Formula I:

[chemical structure]

wherein A is a single bond, or an alkylene, vinylene, —O-alkylene or methine group; R¹ is a bicyclic carbocyclic residue which may partly be saturated and may optionally be substituted by at least one member of the class consisting of lower alkyl, lower alkoxy, oxo and nitro groups and halogen atoms; a fluorene residue which may optionally have an oxo group; a fluorenylidene group; an anthracene residue; a phenanthrene residue which may partly be saturated and may optionally be substituted by at least one lower alkyl group; a benzofuran or thianaphthene residue which may optionally be substituted by at least one member of the class consisting of lower alkyl and lower alkoxy groups; a benzopyran or benzazine residue which may partly be saturated and may optionally be substituted by at least one member of the class consisting of oxo and phenyl groups; a phthalimide residue; a benzodiazone residue; an isoxazole residue which may optionally be substituted by at least one member of the class consisting of lower alkyl and phenyl groups; an alkylenedioxybenzene residue; or a xanthene residue, and R² is a loweralkyl, cycloalkyl, cycloalkylalkyl or aralkyl group.
The methods of producing the compounds of the formula (I) and their chymotrypsin inhibitory activity characteristics have been described in Japanese Patent Application No. 109192/1982 and in Japanese Patent Application filed Apr. 28, 1983.
[0072] 5. inhibitors described in EP 0128007 and U.S. Pat. No. 4,620,005 including: 1-isopropyl-4-[(4-(1,2,3,4-tetrahydro-1-naphthoyloxy)phenyl)carbonyloxymethyl carbonyl]piperazine; 1-isopropyl-4-[(4-(1,2,3,4-tetrahydro-1-naphthoyloxy)phenyl)ethyl carbonyl]piperazine; and 1-isopropyl-4-[(4-(1,2,3,4-tetrahydro-1-naphthoyloxy)phenyl)methylcarbonyl]piperazine;
[0073] 6. inhibitors described U.S. Pat. No. 4,898,876 including inhibitors: 1-isopropyl-4-(4-(5,6,7,8-tetraphydronaphthalene-1-acetyloxy)benzoyl)piperazine hydrochloride; 1-isopropyl-4-(4-(9-fluorenylidene acetyloxy)benzoyl)piperazine; 1-isopropyl-4-(4-(thianaphthene-2-acetyloxy)benzoyl)piperazine methanesulfonate; 1-methyl-4-(4-(7-methoxyl-1,2,3,4-tetrahydro-1-naphtoyloxy) benxoyl)piperazine; methanesulfonate; and 1-methyl-4-(3-(1,2,3,4-tetrahydro-1-naphthoyloxy)benzoyl)piperazine hydrochloride);
[0074] 7. YS3025 (CAS Registry No. 138320-33-9) disclosed by Rizzi et al. (1992 Biochem Int. 28:385-92);

[chemical structure]

[0075] 8. MR889 (CA registry No. 94149-41-4) disclosed by Luisetti et al. (1989 Biochem Biophys Res Commun. 165:568-73);

[chemical structure]

[0076] 9. chymotrypsin inhibitors disclosed by Yokoo et al. (1987 Yakugaku Zasshi 107:732-7), many of which are of the phenyl ester type and which include those represented by CAS Registry Nos. 85858-76-0, 89703-10-6 (also known as FK-448 CA index name 1-Naphthalenecarboxylic acid, 1,2,3,4-tetrahydro-, 4-[[4-(1-methylethyl)-1 piperazinyl]carbonyl]phenyl ester, monomethanesulfonate), 90185-92-5, 90185-96-9, 90185-98-1, 90186-00-8, 90186-01-9, 90186-05-3, 90186-06-4, 90186-07-5, 90186-08-6, 90186-09-7, 90186-10-0, 90186-11-1, 90186-12-2, 90186-13-3, 90186-14-4, 90186-22-4, 90186-23-5, 90186-24-6, 90186-25-7, 90186-27-9, 90186-28-0, 90186-29-1, 90186-31-5, 90186-35-9, 90186-43-9, 90209-88-4, 90209-89-5, 90209-92-0, 90209-94-2, 90209-96-4, 90209-97-5, 90210-01-8, 90210-03-0, 90210-04-1, 90210-25-6, 90210-26-7, 90210-28-9, 90230-84-5, 90409-84-0, 95460-86-9, 95460-87-0, 95460-88-1, 95460-89-2, 95460-91-6, 114949-00-7, 114949-01-8, 114949-02-9, 114949-03-0, 114949-04-1, 114949-05-2, 114949-06-3, 114949-18-7, 114949-19-8, 114964-69-1, and 114964-70-4; and
[0077] 10. the two chymotrypsin inhibitors shown below described by Boulanger (1986 Journal of Medicinal Chemistry 29:1483-7);

[chemical structure]

[0078] Additional chymotrypsin inhibitors include:
[0079] 1. chymostatin (CAS registry No. 9076-44-2);

[chemical structure]

Chymostatin is often provided as a mixture of the three compounds depicted below

[chemical structure]

Thus, chymostatin can be considered to be N—(Na-Carbonyl-[S,S]-a-(2-Iminohexahydro-4-pyrimidyl)glycine)-X-Phe-al)-Phe where X is Leu, Val or Ile. In some cases the mixture is contains all three forms, but the form wherein X is Leu predominates.
Chymostatin variants with improved absorbtion can be useful. For example, the carboxyl group can be converted to a methyl ester, ethyl ester or another ester as shown below. The esters might be metabolized to the acid form.

[chemical structure]

This esterification can be combined with modification of the pyrimidine ring and/or elimination of the backbone carbonyl group as shown in the structures below.

[chemical structure]

Further modification of chymostatin as shown below may also create variants that are more readily absorbed.

[chemical structure]

[0080] 2. 4-(2-aminoethyl)-benzenesulfonylfluoride hydrochloride (Pefabloc; CAS Registry No. 30827-99-7);

[chemical structure]

[0081] 3. benzamidine (CA Registry No. 618-39-3);

[chemical structure]

[0082] 4. di-isopropyl phosphofluoridate (CAS Registry No. 55-91-4);

[chemical structure]

[0083] 5. 6-aminocaproic acid (CAS Registry No. 60-32-2);

[chemical structure]

[0084] 6. CAS Registry No. 88070-98-8;

[chemical structure]

[0085] 7. ecotin (a peptide inhibitor, CAS Registry No. 87928-05-0; ecotin variants with enhanced activity are described in PCT Publication Nos. WO0061634 and WO0061782);
[0086] 8. PMSF;

[chemical structure]

[0087] 9. benzenesulfonamide (also known as N-tosyl-L-phenylalaninechloromethyl ketone (TPCK); CAS Registry No. 402-71-1).

[chemical structure]

[0088] A number of chymotrypsin inhibitors are produced by plants, including: the peptide inhibitor CI2 (CA Registry No. 139466-47-0, GENBANK® Accession S18818, GI: 100574), and variants and homologs thereof including CI-2A (U.S. Pat. No. 5,167,483), CI-2A (WO 9205239), WCI-3 (Shibata et al. 1988 J Biochem (Tokyo) 104:537-43), WCI-2 (Habu et al. 1992 J Biochem (Tokyo) 111:249-58), and WCI-x (Habu et al., supra). Other plant-derived inhibitors have also been described (Bryant et al. 1976 Biochemistry 15:3418-24; Hass et al. 1982 Biochemistry 21:752-6; Birk 1985 Int J Pept Protein Res. 25:113-31; Pearce et al 1982 Archives of Biochemistry and Biophysics 213:456-62; Tamir et al 1996 Journal of Protein Chemistry 15: 219-29; Birk et al 1999 Khimiya beYisra'el 1:9-12; Polya 2003 Studies in Natural Products Chemistry 29: 567-641; Weder et al 2004 Journal of Agricultural and Food Chemistry 52:4219-4226; Teles et al 2004 Phytochemistry 65: 793-799; Tsoi et al 2004 Biological Chemistry 385:185-189 and Kollipara et al. 1992 Journal of Agricultural and Food Chemistry 40:2356-63). Hammond et al 1984 J. Biol. Chem. 259: 9883-9890 describe the Bowman-Birk protease inhibitor (BBI) in soybean (for example see GENBANK® AAO89509 GI:29691202). BBIs are reviewed in Bowman et al. 1993 Protease Inhib. Cancer Chemoprev. Agents 93-6. Synthetic peptides have been generated which mimic BBI inhibitors (McBride et al 2001 Current Medicinal Chemistry 8: 909-917 and McBride et al 2002 Biopolymers 66:79-92). Other chymotrypsin inhibitors are described in Bister et al 2004 Journal of Natural Products 67: 1755-1757; Szenthe et al 2004 Biochemistry 43:3376-3384; Zhou et al. 2004 Comparative Biochemistry and Physiology, Part B: Biochemistry & Molecular Biology 137B:219-224 and Mak et al. 2004 Biochimica et Biophysica Acta 1671:93-105. These chymotrypsin inhibitors and others are useful in the methods of the invention.

[0089] Additional small molecule chypotrypsin inhibitors include:
[0090] leupeptin (CA registry 55123-66-5)

[chemical structure]

[0091] p-tosyl-L-arginine methyl ester (TAME) (CA registry 901-47-3)

[chemical structure]

[0092] N-alpha-tosyl-L-lysine chloromethyl ketone (TLCK) (CA registry 4272-74-6)

[chemical structure]

[0093] 3,4-Dichloroisocoumarin (CA registry 51050-59-0)

[chemical structure]

[0094] CA registry 221051-66-7 (Hayashi et al Peptide Science (1999) 35:249-252 and Iijima et al Journal of Medicinal Chemistry (1999), 42(2), 312-323).

[chemical structure]

[0095] Additional useful peptide inhibitors of chymotrypsin include: urinistatin (bikuni) CA registry 80449-31-6; inhibitors disclosed in Ito et al. Biochemical and Biophysical Research Communications (1972), 49(2), 343-9 (e.g., Ac-Leu-Leu-phenylalinal; Ac-Leu-Leu-tyrosinal; and Ac-Leu-Leu-tryptophanal) and the inhibitors Imperiali and Abeles Biochemistry (1987), 26:4474-7 disclose extended binding inhibitors of chymotrypsin
[0096] Additional small molecule chymotrypsin inhibitors useful in the present invention include:

[chemical structure]

CA registry 130982-43-3 (DuP-714);

[chemical structure]

CA registry 197913-52-3 (disclosed in Biochemistry 36:13180-6 (1997));

[chemical structure]

disclosed in Biochemistry 36:13180-6 (1997);

[chemical structure]

CA registry 179324-22-2 (MG-262 (Cbz-leu-leu-leu-B(OH)2));

[chemical structure]

CA registry 274901-16-5 (LAF-237);

[chemical structure]

CA registry 792163-40-7 (disclosed in Pharm Res. 16:1786 1999);

[chemical structure]

disclosed in Biochemistry 36:13180-6 (1997);

[chemical structure]

CA registry 339169-59-4;

[chemical structure]

CA registry 243462-36-4;

[chemical structure]

CA registry 654671-78-0 (sitagliptin/MK-0431 (Merck)); and

[chemical structure]

bortezomib/Velcade/PS341.

### Prodrugs of Chymotrypsin Inhibitors

[0097] Peptides that are inhibitors of chymotrypsin include those listed below. Prodrug forms of these peptides can be created by modifying the carboxy terminus of the peptide and/or one or more of the carboxylic acid side chains present in the peptide into, for example, an ester, carbonate, carbamate, or phosphate ester. Thus, the carboxylic acid portion of the side chains of aspartic acid and glutamic acid can be modified to an ester. Thus, the —CH₂C(O)OH side chain of aspartic acid can be modified to —CH₂C(O)OR and the —CH₂CH₂C(O)OH side chain of glutamic acid can be modified to —CH₂CH₂C(O)OR, wherein R is selected from a straight chain or branched C₁ to C₆ alkyl (C₁, C₂, C₃, C₄, C₅, C₆), alkenyl, alkynyl, or a C₆ aryl optionally independently substituted with one or more halogen (Cl, F, Br, I), —OH, —C(O)OH, or —NH₃. Alternatively R can be selected from:

[chemical structure]

wherein R₁ is selected from H or a branched or straight chain C₁ to C₆ (e.g., C₁, C₂, C₃, C₄, C₅, C₆) alky alkenyl, alkynyl, aryl, cycloalkyl, or arylalkyl optionally independently substituted with one or more halogen —OH, —C(O)OH, or —NH₃. R₂ is selected from H and straight or branched chain C₁ to C₆ (C₁, C₂, C₃, C₄, C₅, C₆) alkyl.

[0098] In addition, symmetrical and non-symmetrical anhydride prodrug derivatives of the peptide chymotrypsin inhibitors can be created. Thus, two copies of the same peptide can be joined to form a symmetrical anhydride derivative. Such derivatives have the structure P—C(O)—O—C(O)—P where P represents the remainder of the peptide. The two copies of the peptide can be linked through terminal carboxyl groups or through internal carboxyl groups. Two different peptides can be joined to form a non-symmetrical anhydride prodrug derivative. Such derivatives have the structure P′—C(O)—O—C(O)—P where P and P′ represent the remainder of the two different peptides. The two peptides can be linked through terminal carboxyl groups or through internal carboxyl groups.

[0099] Prodrug forms of the peptides can also be created by modifying free hydroxyl groups of the peptide present in the peptide side chains into, for example, an ester, carbonate, carbamate, or phosphate ester. Thus, the —OH portion of the side chains of serine, threonine and tyrosine can be modified to an ester. Thus, the —CH₂OH side chain of serine can be modified to —CH₂C(O)OR, the —CH₂-phenyl-OH side chain of tyrosine can be modified to —CH₂-phenyl-C(O)OR and the —CH(OH)CH₃ side chain of threonine can be modified to —CH(C(O)OR)CH₃, wherein R is selected from a straight chain or branched C₁ to C₆ alkyl (e.g., C₁, C₂, C₃, C₄, C₅, C₆), alkenyl, alkynyl, or a C₆ aryl optionally independently substituted with one or more halogen (Cl, F, Br, I), —OH, —C(O)OH, —NH₃. Alternatively R can be selected from

[chemical structure]

wherein R₁ is selected from H or a branched or straight chain C₁ to C₆ (C₁, C₂, C₃, C₄, C₅, C₆) alkyl, alkenyl, alkynyl, an aryl group, an cycloalkyl group, or an arylalkyl group optionally independently substituted with one or more halogen —OH, —C(O)OH, or —NH₃.

[0100] In some embodiments, the prodrug chymotrypsin inhibitor peptide molecules may comprise one or more modifications of —OH or —COOH groups to ester, carbamate, carbonate, phosphate or other derivatives described herein. For example, a prodrug chymotrypsin inhibitor peptide may comprise an ester at its carboxy terminus and an internal serine modified to a carbonate derivative. Thus, one, two or more of the —OH and —COOH groups in a peptide can be modified and the modifications can be different or identical. Examples of chymotrypsin inhibitors which are peptides that can be modified to create prodrug derivatives include but are not limited to:

[0101] 1. tissue-factor-pathway inhibitor (TFPI) (Peterson et al. 1996 Eur J Biochem 235:310-6; for examples see human (GENBANK® AAH15514 GI:15930156), mouse (GENBANK® AAH36146 GI:23271605), and dog (GENBANK® AAB32443 GI:833924));

[0102] 2. α-2 antiplasmin (Potempa et al. 1988 Science 241: 99-700, GENBANK® Accession P08697, GI:112907; (SEQ ID NO. 2); MALLWGLLVLSWSCLQGPCSVFSPVSAMEPLGRQLTSGPNQEQVSPLTLLKLGN QEPGGQTALKSPPGVCSRDPTPEQTHRLARAMMAFTADLFSLVAQTSTCPNLILS PLSVALALSHLALGAQNHTLQRLQQVLHAGSGPCLPHLLSRLCQDLGPGAFRLA ARMYLQKGFPIKEDFLEQSEQLFGAKPVSLTGKQEDDLANINQWVKEATEGKIQ EFLSGLPEDVLLLLNAIHFQGFWRNKFDPSLTQRDSFHLDEQFTVPVEMMQARTY PLRWFLLEQPEIQVAHFPFKNNMSFVVLVPTHFEWNVSQVLANLSWDTLHPPLV WERPTKVRLPKLYLKHQMDLVATLSQLGLQELFQAPDLRGISEQSLVVSGVQHQ STLELSEVGVEAAAATSIAMSRMSLSSFSVNRPFLFFIFEDTTGLPLFVGSVRNPNP SAPRELKEQQDSPGNKDFLQSLKGFPRGDKLFGPDLKLVPPMEEDYPQFGSPK);

[0103] 3. members of the serpin α-1 antichymotrypsin family (Forsyth et al. 2003 Genomics 81: 336-45; for example see CAS Registry No. 141176-92-3; functional variants thereof are described in European patent application EP1415664 and in Plotnick et al. 2003 Biochemistry 33:29927 (for example the P2 (Leu-357) variant);

[0104] 4. gelin (U.S. Pat. No. 5,397,694, partial sequence (aa 1-29) can be found at GENBANK® Accession AAB27871, GI:409493; (SEQ ID NO:3) VDEKAEVTDGLCGDWTCSGAQVXQNDAAV), which has been proposed as a treatment for dermatitis as well for periodontitis and gingivitis;

[0105] 5. hirustasin (Sollner et al. 1994 Eur J Biochem. 219: 937-43, GENBANK® Accession No P80302, GI:461516: (SEQ ID NO:4); TQGNTCGGETCSAAQVCLKGKCVCNEVHCRIRCKYGLKKD ENGCEYPCSCAKASQ);

[0106] 6. certain eglins, including eglin C (GENBANK® Accession P01051, GI:124128; (SEQ ID NO: 5) TEFGSELKSFPEVVGKTVDQAREYFTLHYPQYDVYFLPEGSPVTLDLRYNRVRVF YNPGTNVVNHVPHVG) are peptide inhibitors of chymotrypsin. For other examples of eglins, see those disclosed in U.S. Pat. No. 5,180,667, U.S. Pat. No. 6,342,373, U.S. Pat. No. 4,636,489, Seemuller et al. 1981 Methods Enzymol. 804-816, Seemueller et al. 1986 Research Monographs in Cell and Tissue Physiology 337-59, Nick et al 1988 Adv in Experimental Medicine and Biology 240:83-8, and Schnebli et al 1986 Pulm. Emphysema Proteolysis (conference) CAN 107:228147 AN 1987:628147), which has been considered as a treatment for emphysema and for use as a non-steroidal anti-inflammatory agent;

[0107] 7. inhibitors from Bombyx mori (see, e.g., JP 4013698 A2 and JP 04013697 A2; CA registry No. 142628-93-1, (SEQ ID NO: 6) DEPTTKPFCEQAFGDCGTPY and CA registry No. 142628-94-2, (SEQ ID NO: 7) DKPTTEPFIC EQRFGNCGTG);

[0108] 8. the leech derived peptide thrombin inhibitor, hirudin (Zwilling 1968 Hoppe-Seyler's Zeitschrift fuer Physiologische Chemie 349:1787-8, CA Registry No. 8001-27-2, see for example, GENBANK® Accession AAA01384 GI:269388, (SEQ ID NO: 8) ITYTDCTESGQNLCLCEGSNVCGKGNKClLGSQGKDNQCVTGEGTPKPQSHNQG DFEPIPEDAYDE). Hirudin variants are disclosed in the literature (for examples see those in U.S. Pat. No. 5,674,838, Great Britain patent application GB2242681 and those described in Wirsching et al 2003 Molecular Genetics and Metabolism 80:451-462);

[0109] 9. a shorter hirudin variant, hirulog/BG 8967 (CA Registry No. 128270-60-0, (SEQ ID NO: 9); FPRPGGGGNGDFEEIPEEYL; Angiomax® (bivalirudin)) may also have chymotrypsin inhibition activity and may thus be useful in the present invention along with other peptides disclosed in PCT publication WO04076484 and U.S. Pat. No. 5,196,404;

secretory leukocyte protease inhibitor (SLPI) (for examples see GENBANK® CAA28187 GI:758101 (human), GENBANK® Accession NP_{—}445824.1 GI:16758102 (rat), and GENBANK® Accession NP_{—}035544.1 GI:6755574 (mouse); also Farley et al. 1997 Drugs and the Pharmaceutical Sciences 84:305-334;

[0110] 10. α-1 anti-trypsin which can inhibit elastase as well as chymotrypsin and thus may be useful in the present invention (for examples see GENBANK® Accession CAB06092 GI:2780174 (human) and GENBANK® Accession NP_{—}001009663 GI:57527135 (rat)). This product has been sold to treate α-1 anti-trypsin deficiency (a genetic disorder) as Zemaira™ (Aventis Behring; FDA biologics license 2003 License #1281), Prolastin® (Bayer), and Aralast™ (Baxter); and

[0111] 11. the inhibitor aprotinin or a derivative thereof (TRASYLOL®); CAS Registry No. 9087-70-1; MKMSRLCLSVALLVLLGTLAASTPGCDTSNQAKAQRPDFCLEPPYTGPCKARIIR YFYNAKAGLCQTFVYGGCRAKRNNFKSAEDCMRTCGGAIGPWENL; (SEQ ID NO. 10).

[0112] In addition, a large number of peptide inhibitors of chymotrypsin are reviewed by Schoofs et al. (2002 Curr Pharm Des. 8: 483-91) and by Salier et al. (1996 Biochem J. 315:1-9). McBride et al. 1996J Mol Biol. 259: 819-27 and McBride et al. 2000 J Pept Sci. 6:446-52 disclose chymotrypsin inhibitors derived from combinatorial peptide libraries including those represented by CAS registry Nos. 306762-66-3, 306762-67-4, 306762-68-5, 306762-69-6, 306762-70-9, 306762-71-0, 306762-72-1, 306762-73-2, 306762-74-3, 306762-75-4, 178330-92-2, 178330-93-3, 178330-94-4, and 178330-95-5.

[0113] In addition, various small molecule inhibitors of chymotrypsin are prodrugs of chymotrypsin inhibitors or can be converted into prodrugs. Examples include, but are not limited to:

compounds with chymotrypsin inhibition activity described in U.S. Pat. No. 4,755,383 which may act as prodrugs (including, 1-Naphthaleneacetic acid, 4-[[4-(1-methylethyl)-1-piperazinyl]carbonyl]phenyl ester (CA registry No. 90186-24-6), Acetic acid, 9H-fluoren-9-ylidene-, 4-[[4-(1-methylethyl)-1-piperazinyl]carbonyl]phenyl ester (CA registry No. 90185-93-6), 1-Naphthalenecarboxylic acid, 1,2,3,4-tetrahydro-4-[[4-(1-methylethyl)-1-piperazinyl]carbonyl]phenyl ester, monomethanesulfonate (CA registry No. 89703-10-6), 1-Naphthalenecarboxylic acid, 1,2,3,4-tetrahydro-, 4-[(4-cyclohexyl-1-piperazinyl)carbonyl]phenyl ester (CA registry No. 85858-74-8), and 1-isopropyl-4-[4-(1,2,3,4-tetrahydronaphthoyloxy) benzoyl]piperazine methanesulfonate);
[0114] chymotrypsin inhibitors described in U.S. Pat. Nos. 4,755,383 and 4,639,435 which may act as prodrugs including those of Formula I:

[chemical structure]

[0115] wherein A is a single bond, or an alkylene, vinylene, —O-alkylene or methine group; R¹ is a bicyclic carbocyclic residue which may partly be saturated and may optionally be substituted by at least one member of the class consisting of lower alkyl, lower alkoxy, oxo and nitro groups and halogen atoms; a fluorene residue which may optionally have an oxo group; a fluorenylidene group; an anthracene residue; a phenanthrene residue which may partly be saturated and may optionally be substituted by at least one lower alkyl group; a benzofuran or thianaphthene residue which may optionally be substituted by at least one member of the class consisting of lower alkyl and lower alkoxy groups; a benzopyran or benzazine residue which may partly be saturated and may optionally be substituted by at least one member of the class consisting of oxo and phenyl groups; a phthalimide residue; a benzodiazone residue; an isoxazole residue which may optionally be substituted by at least one member of the class consisting of lower alkyl and phenyl groups; an alkylenedioxybenzene residue; or a xanthene residue, and R² is a loweralkyl, cycloalkyl, cycloalkylalkyl or aralkyl group. The methods of producing the compounds of the formula (I) and their chymotrypsin inhibitory activity characteristics have been described in Japanese Patent Application No. 109192/1982 and in Japanese Patent Application filed Apr. 28, 1983;
   inhibitors described in EP 0128007 and U.S. Pat. No. 4,620,005 which may act as prodrugs including: 1-isopropyl-4-[(4-(1,2,3,4-tetrahydro-1-naphthoyloxy)phenyl)carbonyloxymethyl carbonyl]piperazine; 1-isopropyl-4-[(4-(1,2,3,4-tetrahydro-1-naphthoyloxy)phenyl)ethyl carbonyl]piperazine; and 1-isopropyl-4-[(4-(1,2,3,4-tetrahydro-1-naphthoyloxy)phenyl)methylcarbonyl]piperazine; inhibitors described U.S. Pat. No. 4,898,876 which may act as prodrugs including inhibitors: 1-isopropyl-4-(4-(5,6,7,8-tetraphydronaphthalene-1-acetyloxy)benzoyl)piperazine hydrochloride; 1-isopropyl-4-(4-(9-fluorenylidene acetyloxy)benzoyl)piperazine; 1-isopropyl-4-(4-(thianaphthene-2-acetyloxy)benzoyl)piperazine methanesulfonate; 1-methyl-4-(4-(7-methoxyl-1,2,3,4-tetrahydro-1-naphtoyloxy) benxoyl)piperazine; methanesulfonate; and 1-methyl-4-(3-(1,2,3,4-tetrahydro-1-naphthoyloxy)benzoyl)piperazine hydrochloride);
   Prodrug variants of YS3025 (CAS Registry No. 138320-33-9) disclosed by Rizzi et al. (1992Biochem Int. 28:385-92);

[chemical structure]

Suitable prodrugs of which include compounds having the structure:

[chemical structure]

[0116] wherein R is selected from a straight chain or branched C₁ to C₆ alkyl (C₁, C₂, C₃, C₄, C₅, C₆), alkenyl, alkynyl, or a C₆ aryl optionally independently substituted with one or more halogen (Cl, F, Br, I), —OH, —C(O)OH, or —NH₃. Alternatively R can be selected from

[chemical structure]

[0117] wherein R₁ is selected from H or a branched or straight chain C₁ to C₆ (C₁, C₂, C₃, C₄, C₅, C₆) alkyl, alkenyl, alkynyl, aryl, cycloalkyl, or arylalkyl optionally independently substituted with one or more halogen —OH, —C(O)OH, or —NH₃ and R₂ is selected from H, straight or branched chain C₁ to C₆ (C₁, C₂, C₃, C₄, C₅, C₆) alkyl. Thus, in the case where R is

[chemical structure]

the resulting prodrug of YS3025 (CAS Registry No. 138320-33-9) is a symmetrical anhydride and has the structure:

[chemical structure]

chymotrypsin inhibitors disclosed by Yokoo et al. (1987 Yakugaku Zasshi 107:732-7), many of which are of the phenyl ester type and may act as prodrugs, including those represented by CAS Registry Nos. 85858-76-0, 89703-10-6 (also known as FK-448 CA index name 1-Naphthalenecarboxylic acid, 1,2,3,4-tetrahydro-, 4-[[4-(1-methylethyl)-1-piperazinyl]carbonyl]phenyl ester, monomethanesulfonate), 90185-92-5, 90185-96-9, 90185-98-1, 90186-00-8, 90186-01-9, 90186-05-3, 90186-06-4, 90186-07-5, 90186-08-6, 90186-09-7, 90186-10-0, 90186-11-1, 90186-12-2, 90186-13-3, 90186-14-4, 90186-22-4, 90186-23-5, 90186-24-6, 90186-25-7, 90186-27-9, 90186-28-0, 90186-29-1, 90186-31-5, 90186-35-9, 90186-43-9, 90209-88-4, 90209-89-5, 90209-92-0, 90209-94-2, 90209-96-4, 90209-97-5, 90210-01-8, 90210-03-0, 90210-04-1, 90210-25-6, 90210-26-7, 90210-28-9, 90230-84-5, 90409-84-0, 95460-86-9, 95460-87-0, 95460-88-1, 95460-89-2, 95460-91-6, 114949-00-7, 114949-01-8, 114949-02-9, 114949-03-0, 114949-04-1, 114949-05-2, 114949-06-3, 114949-18-7, 114949-19-8, 114964-69-1, and 114964-70-4; and
Prodrugs of 6-aminocaproic acid (CAS Registry No. 60-32-2);

[chemical structure]

[0118] Suitable prodrugs of the compound include:

[chemical structure]

[0119] wherein R is selected from a straight chain or branched C₁ to C₆ alkyl (C₁, C₂, C₃, C₄, C₅, C₆), alkenyl, alkynyl, or a C₆ aryl optionally independently substituted with one or more halogen (Cl, F, Br, I), —OH, —C(O)OH, or —NH₃. Alternatively R can be selected from

[chemical structure]

wherein R₁ is selected from H or a branched or straight chain C₁ to C₆ (C₁, C₂, C₃, C₄, C₅, C₆) alkyl, alkenyl, alkynyl, aryl, cycloalkyl, or arylalkyl optionally independently substituted with one or more halogen —OH, —C(O)OH, —NH₃ and R₂ is selected from H, straight or branched chain C₁ to C₆ (C₁, C₂, C₃, C₄, C₅, C₆) alkyl. For produrg forms of 6-aminocaproic acid (CAS Registry No. 60-32-2) where R is

[chemical structure]

the resulting compound is a symmetrical anhydride and has the structure

[chemical structure]

[0120] Other chymotrypsin inhibitors which might be modified to prodrugs by converting a —COOH or —OH group to an ester or other derivative including but not limited to those described herein include: chymotrypsin inhibitors that are produced by plants, including: the peptide inhibitor CI-2 (CA Registry No. 139466-47-0, GENBANK® Accession S18818, GI:100574), and variants and homologs thereof including CI-2A (U.S. Pat. No. 5,167,483), CI-2A (WO 9205239), WCI-3 (Shibata et al. 1988 J Biochem (Tokyo) 104:537-43), WCI-2 (Habu et al. 1992 J Biochem (Tokyo) 111:249-58), and WCI-x (Habu et al., supra). Other plant-derived inhibitors have also been described (Bryant et al. 1976 Biochemistry 15:3418-24; Hass et al. 1982 Biochemistry 21:752-6; Birk 1985 Int J Pept Protein Res. 25:113-31; Pearce et al 1982 Archives of Biochemistry and Biophysics 213:456-62; Tamir et al 1996 Journal of Protein Chemistry 15: 219-29; Birk et al 1999 Khimiya beYisra'el 1:9-12; Polya 2003 Studies in Natural Products Chemistry 29: 567-641; Weder et al 2004 Journal of Agricultural and Food Chemistry 52:4219-4226; Teles et al 2004 Phytochemistry 65: 793-799; Tsoi et al 2004 Biological Chemistry 385:185-189 and Kollipara et al. 1992 Journal of Agricultural and Food Chemistry 40:2356-63). Hammond et al 1984 J. Biol. Chem. 259: 9883-9890 describe the Bowman-Birk protease inhibitor (BBI) in soybean (for example see GENBANK® AAO89509 GI:29691202). BBIs are reviewed in Bowman et al. 1993 Protease Inhib. Cancer Chemoprev. Agents 93-6. Synthetic peptides have been generated which mimic BBI inhibitors (McBride et al 2001 Current Medicinal Chemistry 8: 909-917 and McBride et al 2002 Biopolymers 66:79-92). Other chymotrypsin inhibitors are described in Bister et al 2004 Journal of Natural Products 67: 1755-1757; Szenthe et al 2004 Biochemistry 43:3376-3384; Zhou et al. 2004 Comparative Biochemistry and Physiology, Part B: Biochemistry & Molecular Biology 137B:219-224 and Mak et al. 2004 Biochimica et Biophysica Acta 1671:93-105.

### Chymotrypsin-Like Enzymes

[0121] Inhibitors of a chymotrypsin-like enzyme and prodrugs thereof can be useful in any of the methods described herein. This is because certain inhibitors of chymotrypsin-like enzymes are also inhibitors of chymotrypsin and can interfere with the cleavage (and inactivation) of guanylin (or guanylin variants) caused by chymotrypsin. In other cases, inhibitors of a chymotrypsin-like enzyme (e.g., the chymotrypsin-like enzyme present in renal sources that is believed to cause cleavage of guanylin) are useful because they are inhibitors of a chymotrypsin-like enzyme that cleaves guanylin in the human body.

[0122] A chymotrypsin-like enzyme may exhibit one more similarities to chymotrypsin including but not limited to: (i) catalytic mechanism, (ii) substrate specificity, (iii) structure (i.e. how the enzyme is folded) or (iv) any additional property in which the enzyme resembles chymotrypsin. Chymotrypsin-like enzymes are described in the prior art and include: chymase, Ctrl/chymotrypsin A/CTRA-1 (Mouse: GENBANK® Accession No. AAL11034 GI:15963449; human: GENBANK® Accession No. NP_{—}001898 GI:4503137); the chymotrypsin-like enzyme described in Firth et al. 1996 J Periodontal Res. 31:345-54; clipsin (described in Nelson et al. 1990 J Biol Chem. 265:3836-43); and the chymotrypsin-like endopeptidases from opossum kidney cells and clonal osteogenic UMR-106 cells (described in Yamaguchi et al. 1988 Endocrinology 123:2812 and Yamaguchi et al. 1989 Biochim Biophys Acta. 1010:177 respectively). Other chymotrypsin-like enzymes are described by Arribas and Castano (1993 J Biol Chem. 268:21165-71). Bartuski et al 1998 Genomics 54:297 identify a murine ortholog of the human SCCA2 chymotrypsin-like serine proteinase. A number of virus encoded proteinases encode chymotrypsin-like enzymes. For examples see those described in Ziebuhr et al. 2000 Journal of General Virology 81:853-879, Dougherty and Semler 1993 Microbiological Reviews 57:781-822, Ryan and Flint 1997 Journal of General Virology 78:699-723, and Chang et al 1995 Biochem Biophys Res Commun. 213:475-83. Snijder et al. 1996 Journal of Biol Chem 271:4864 discuss the Arterivirus Nsp4 Protease as a prototype the 3C-like Serine Proteases family of chymotrypsin-like enzymes. The hepatitis C virus NS3-NS4A protease exhibits chymotrypsin like activity. (Perni 2000 Drug News Perspect. 13:69-77). Both cathepsin A (lysosomal) and cathepsin G have been reported to have chymotrypsin-like activity. The 20S proteasome also exhibits chymotrypsin-like activity.

### Inhibitors of Chymotrypsin-Like Enzymes

[0123] Inhibitors of chymotrypsin-like enzymes and prodrugs of inhibitors of chymotrypsin-like enzymes including, but not limited to, inhibitors of the 20S proteasome, inhibitors of cathepsin, inhibitors of chymase, and inhibitors of hepatitis C virus NS3-NS4A protease are useful in the pharmaceutical compositions and methods described herein.

[0124] Various inhibitors of chymotrypsin-like proteases (e.g. inhibitors of chymotrypsin-like enzymes) have been described. In some instances, the inhibitors are useful because they inhibit one or more chymotrypsin or chymotrypsin-like proteases. For example, the serine protease inhibitors disclosed in U.S. Pat. No. 6,262,069, U.S. Pat. No. 5,916,888, U.S. Pat. No. 5,900,400, U.S. Pat. No. 5,157,019, U.S. Pat. No. 4,829,052, U.S. Pat. No. 5,723,316, and U.S. Pat. No. 5,807,829 are useful as inhibitors of chymotrypsin, chymase or other chymotrypsin-like proteases. U.S. Pat. No. 5,314,815 discloses adducts of serine hydrolase with a phosphate or phosphonate which are useful as inhibitors of chymotrypsin and chymotrypsin-like enzymes (e.g., chymase and cathepsin G). Specifically disclosed species include: 4-nitrophenyl phenacyl methylphosphate; 4-nitrophenyl 4-nitrophenacyl methylphosphate; 4-nitrophenyl 4-methylphenacyl methylphosphate; 4-nitrophenyl 4-methoxyphenacyl methylphosphate; and 4-nitrophenyl 4-chlorophenacyl methylphosphate. US20030129720 discloses a plant serine protease inhibitor useful as an inhibitor of chymotrypsin or chymotrypsin-like proteases.

[0125] Inhibitors of the Chymotrypsin-Like Activity of the 20S Proteasome

[0126] Numerous inhibitors of the chymotrypsin-like activity of the 20S proteasome have been described. These include but are not limited to commercially available inhibitors such as:_N-Acetyl-L-leucyl-L-leucyl-L-norleucinal, Aclacinomycin A (Aclarubicin), (−)-Epigallocatechin gallate (EGCG), Epoxomicin, Lactacystin, clasto-Lactacystin β-lactone, N-Tosyl-Phe-chloromethylketone (TPCK), NIP-(Leu)₃-vinyl sulphone, Phepropeptin A, Phepropeptin B, Phepropeptin C, Phepropeptin A-D pack, Z-Ile-Glu(OBut)-Ala-Leu-H (PSI), Z-Leu-Leu-Leu-vinyl sulphone, Z-Leu-Leu-Nva-H (MG115), Z-Leu-Leu-Leu-H (MG132), Z-Leu-Leu-Leu-B(OH)₂ (MG262), and Z-Leu-Leu-Tyr-COCHO. Additional inhibitors of the chymotrypsin-like activity of the 20S proteasome include tannic acid (Tam et al. 2001 Cancer Epidemiology Biomarkers & Prevention 10: 1083-1088), 5-Methoxy-1-Indanone Dipeptide Benzamides (Lum et al 1998 Bioorganic & Medicinal Chemistry Letters 8:209-214), and peptide aldehydes (Fenteany and Schreiber 1996 Chem. Biol. 3:905).

[0127] Cathepsin Inhibitors

[0128] Cathepsin G is a chymotrypsin-like serine protease found in the azurophilic granules of polymorphonuclear leukocytes which functions to degrade proteins during inflammatory responses. Bania et al 1999 Eur. J. Biochem. 262:680-687 describe the primary structure and properties of a cathepsin G inhibitor from the larval hemolymph of Apis mellifera. US20010056180 discloses peptides which encode serine protease inhibitors including variants which have an improved ability to inhibit cathepsin G. U.S. Pat. No. 5,780,449 discloses cathepsin G inhibiting aptamers.

[0129] Inhibitors of the Hepatitis C Virus NS3-NS4A Chymotrypsin-Like Activity

[0130] Many inhibitors of Hepatitis C virus NS3-NS4A protease have been described including those disclosed in: Perni 2000 Drug News Perspect. 13:69-77, Bianchi and Pessi 2002 Biopolymers 66:101-14, Sperandio et al 2002 Bioorg Med Chem Lett. 12:3129-33 and US published patent applications US20040018986, US20030236242 US2003011975, US20030100768, US20040180815 (pyridazinonyl macrocyclic inhibitors), and US20030064962. US20040266668 describes quinoxalinyl macrocyclic inhibitors that inhibit the activity of NS3-NS4A.

[0131] Chymase Inhibitors

[0132] Chymase has a variety of functions, including degradation of extracellular matrix proteins, cleavage of angiotensin I to angiotensin II and activation of matrix proteases and cytokines. Inadequate control by endogenous chymase inhibitors can lead to degradation of healthy constituents of the extracellular matrix thereby contributing to inflammatory disorders. Chymase inhibitors and prodrugs thereof are useful in the pharmaceutical compositions and methods described herein. In certain embodiments, the chymase inhibitor inhibits human chymase activity. Human chymase inhibitors may inhibit human heart chymase, human mast cell chymase or human skin chymase.

[0133] Chymase inhibitors include but are not limited to: acetoamide derivatives (Japanese Unexamined Patent Publication No. 10-7661), acetoamide derivatives (WO99/41277), benzimidazole derivatives (US20040162311, US20040010004, US20040122042, WO00/03997, WO01/53272, and WO01/53291), cefam compounds (Japanese Unexamined Patent Publication No. 10-087493) acid anhydride derivatives (Japanese Unexamined Patent Publication No. 11-049739), heterocyclic amide compounds (WO 99/32459), hydantoin derivatives (Japanese Unexamined Patent Publication No. 9-31061), imidazolidine derivatives (WO 96/04248), isoxazole derivatives (Japanese Unexamined Patent Publication No. 11-1479), phosphonic compounds (US20030195172), phosphoric acid derivatives (Oleksyszyn et al. 1991 Biochemistry 30:485), pyrimidinone derivatives (Akahoshi 2003 Curr Pharm Des. 9:1191-9), quinazoline derivatives (US20020183338), quinazoline derivatives (WO 97/11941), thiazine derivatives (US20040097496), triazine derivatives (Japanese Unexamined Patent Publication No. 8-208654), and tripeptide compounds (WO 93/03625). Chymase inhibitors are also disclosed in patent publications US20040086537, WO 00/05204, WO 00/06594, WO 00/10982, WO 00/32587, WO 01/122261, WO 01/322214, WO 01/32621, WO 01/83471, WO 02/122595, WO 02/18378, WO 96/39373, WO 98/18794, WO 99/09977, and WO 99/45928. Additional examples of chymase inhibitors are disclosed in Japanese Unexamined Patent Publication Nos. 10-245384, 10-251239, 10-53579, 11-246437, 11-48739, 2000-95770, and 2001-97957. Other examples of chymase inhibitors include: SQN-5 (CA Registry No. 205944-60-1), MNEI (CA Registry No. 216503-90-1), NK3201 (Takai and Miyazaki 2003 Cardiovasc Drug Rev. 21:185-98); NK301 (Doggrell and Wanstall 2003 Expert Opin Investig Drugs. 12:1429-32); Methyllinderone (CA Registry No. 3984-73-4), and BCEAB (4-[1-[[bis-(4-methylphenyl)-methyl]-carbamoyl]-3-(2-ethoxybenzyl)-4-oxo-azetidine-2-yloyl]-benzoic acid. US20040058963 discloses indole derivatives as chymase inhibitors including but not limited to compounds 3-83 as defined in claim 4.

[0134] US20040018984 discloses peptidyl derivatives of aryl diesters of α-aminoalkylphosphonic acids. For example, Suc-Val-Pro-Phe^{p}(OPh)₂ and enantiomerically enriched preparations thereof are specifically disclosed.

[0135] US20030083315 discloses benzimidazole derivatives as chymase inhibitors. For example, the following species are disclosed: 4-((1-((1-naphthyl)methyl)-5-methoxybenzimidazole)-2-ylthio)butyric Acid; 4-((1-naphthyl)methyl)-5,6-difluorobenzimidazole)-2-ylthio)butyric Acid; 4-(1-((1-naphthyl)methyl)-5-cyanobenzimidazole-2-ylthio)butyric Acid; 4-(1-((1-naphthyl)methyl)-5-cyanobenzimidazole-2-yl)-3,3-dimethylbutyric Acid; 4-(1-((1-naphthyl)methyl)benzimidazole-2-ylthio)butyric Acid; Sodium 4-(1-((1-naphthyl)methyl)benzimidazole-2-ylthio)butyrate; 4-(1-((8-methyl-1-naphthyl)methyl)benzimidazole-2-ylthio)butyric Acid; 4-(1-((8-methyl-1-naphthyl)methyl)-5,6-dimethylbenzimidazole-2-ylthio)-butyric Acid; 5-(1-((1-naphthyl)methyl)benzimidazole-2-ylthio)-4-oxo-3,3-dimethylvaleric Acid; 4-(1-((1-naphthyl)methyl)-5-trifluoromethylbenzimidazole-2-ylthio)butyric Acid; 4-(1-((2,5-dimethylphenil)methyl)-5-methoxybenzimidazole-2-ylthio)butyric Acid; 4-(1-((2,5-dimethylphenyl)methyl)-5-cyanobenzimidazole-2-ylthio)butyric Acid; 4-(1-((1-naphthyl)methyl)-5-ethoxybenzimidazole-2-ylthio)butyric Acid; 3-(1-((1-naphthyl)methyl)-benzimidazole-2-ylthio)propanoic Acid; 5-(1-((1-naphthyl)methyl)-benzimidazole-2-ylthio)valeric Acid; 4-(1-((1-naphthyl)methyl)-5,6-dimethylbenzimidazole-2-ylthio)butyric Acid; 4(1-((1-naphthyl)methyl)-5,6-dimethylbenzimidazole-2-ylsulfonyl)butyric Acid; and 4-(1-((2,5-dimethylphenyl)methyl)-7-azabenzimidazole-2-ylthio)butyric Acid.

US20020187989 discloses quinazoline derivative as chymase inhibitors. For example, the following species are disclosed:
[0136] 7-chloro-3-(3-hydroxybenzenesulfonyl)-2,4(1H,3H)-quinazolinedione;
[0137] 3-(4-hydroxybenzenesulfonyl)-7-chloro-2,4(1H,3H)-quinazolinedione;
[0138] 3-(3-carboxymethyl-benzenesulfonyl)-7-chloro-2,4(1H,3H)-quinazolinedione;
[0139] 3-(4-carboxymethyl-benzenesulfonyl)-7-chloro-2,4(1H,3H)-quinazolinedione;
[0140] 3-[(3-carboxymethylaminophenyl)sulfonyl]-7-chloro-2,4(1H,3H)-quinazolinedione;
[0141] (+)-2-{4-[(7-chloro-2,4(1H,3H)-quinazolin-3-yl)sulfonyl]phenyl}butyric acid;
[0142] 2-{3-[(7-chloro-2,4(1H,3H)-quinazolinedion-3-yl)sulfonyl]phenylaminocarbonyl}propionic acid;
[0143] 3-{3-[(7-chloro-2,4(1H,3H)-quinazolinedion-3-yl)sulfonyl]phenyl}acrylic acid;
[0144] 4-[(7-chloro-2,4(1H,3H)-quinazolinedion-3-yl)sulfonyl]salicylic acid;
[0145] 4-[(7-chloro-2,4(1H,3H)-quinazolinedion-3-yl)sulfonyl]salicylic acid monosodium salt;
[0146] 4-[(7-chloro-2,4(1H,3H)-quinazolinedion-3-yl)sulfonyl]anthranilic acid;
[0147] 4-[(7-chloro-2,4(1H,3H)-quinazolinedion-3-yl)sulfonyl]anthranilic acid monosodium salt;
[0148] 4-[(2,4(1H,3H)-quinazolinedion-3-yl)sulfonyl]salicylic acid;
[0149] 5-[(7-chloro-2,4(1H,3H)-quinazolinedion-3-yl)sulfonyl]salicylic acid;
[0150] 4-[(7-chloro-2,4(1H,3H)-quinazolinedion-3-yl)sulfonyl]-1-hydroxy-nanhthalene-2-carboxylic acid;
[0151] 5-[(7-chloro-2,4(1H,3H)-quinazolinedion-3-yl)sulfonyl]anthranilic acid;
[0152] 4-[(7-methoxy-2,4(1H,3H)-quinazolinedion-3-yl)sulfonyl]anthranilic acid;
[0153] (+)-7-[(7-chloro-2,4(1H,3H)-quinazolinedion-3-yl)sulfonyl]-2-oxo-1H,3H-quinoline-3-carboxylic acid;
[0154] (+)-6-[(7-chloro-2,4(1H,3H)-quinazolinedion-3-yl)sulfonyl]-3-oxo-1,4-benzoxazine-2-carboxylic acid;
[0155] 4-[(7-hydroxy-2,4(1H,3H)-quinazolinedion-3-yl)sulfonyl]anthranilic acid;
[0156] 4-[(7-chloro-2,4(1H,3H-quinazolinedion-3-yl)sulfonyl]-2-N-propionylanthranilic acid;
[0157] 4-[(6-chloro-2,4(1H,3H)-quinazolinedion-3-yl)sulfonyl]anthranilic acid; 4-[(7-chloro-2,4(1H,3H)-quinazolinedion-3-yl)sulfonyl]-2-N-methanesulfonylanthranilic acid;
[0158] 3-(3-acetamide-4-methoxybenzenesulfonyl)-7-chloro-2,4(1H,3H)-quinazolinedione;
[0159] 3-(3-amino-4-methoxybenzenesulfonyl)-7-chloro-2,4(1H,3H)-quinazolinedione;
[0160] 7-chloro-3-(4-methoxy-3-methylsulfonylaminobenzenesulfonyl)-2,4(1H,3H)-quinazolinedione;
[0161] 3-(2-aminobenzenesulfonyl)-7-chloro-2,4(1H,3H)-quinazolinedione;
[0162] 7-chloro-3-(2-methylsulfonylaminobenzenesulfonyl)-2,4(1H,3H-quinazolinedione;
[0163] 3-(4-aminobenzenesulfonyl)-7-chloro-2,4(1H,3H)-quinazolinedione;
[0164] 3-(3-amino-4-chlorobenzenesulfonyl)-7-chloro-2,4(1H,3H)-quinazolinedione;
[0165] 3-(4-amino-3,5-dichlorobenzenesulfonyl)-7-chloro-2,4(1H,3H)-quinazolinedione;
[0166] 3-(3-amino-4-methylbenzenesulfonyl)-7-chloro-2 4(in 3H)-quinazolinedione; and
[0167] 3-(3-aminobenzenesulfonyl)-7-chloro-2,4(1H,3H)-quinazolinedione;

[0168] US200201833393 discloses quinazoline derivative as chymase inhibitors. For example, (3-aminobenzenesulfonyl)-7-chloro-2,4-(1H,3H)quinazolinedione Methanesulfonic Acid Salt and 7-chloro-3-[4-(pyrazol-3-yl)benzenesulfonyl]-2,4(1H,3H)-quinazolinedione Hydrochloride are disclosed.

[0169] US20030229126 discloses N-substituted benzothiophenesulfonamide derivatives as chymase inhibitors. For example, the following species are disclosed:
[0170] 5-chloro-N-(4-hydroxymethyl-2-methanesulfonylphenyl)-3-methylbenzo[b]thiophene-2-sulfonamide;
[0171] 5-fluoro-N-[4-(4-hydroxymethyloxazol-2-y-l)-2-methanesulfonylphenyl]-3-methylbenzo[b]thiophene-2-sulfonamide;
[0172] 5-fluoro-N-[4-(4-hydroxymethylthiazol-2-yl)-2-methanesulfonylphenyl]-3-m-ethylbenzo[b]thiophene-2-sulfonamide;
[0173] 2-[4-(5-chloro-3-methylbenzo[b]thiophene-2-sulfonylamino)-3-methanesulfonylphenyl]oxazole-4-carboxylic acid;
[0174] 2-[4-(5-fluoro-3-methylbenzo[b]thiophene-2-sulfonylamino)-3-methanesulfonylphenyl]oxazole-4-carboxylic acid;
[0175] disodium 2-[4-(5-chloro-3-methylbenzo[-b]thiophene-2-sulfonylamino)-3-methanesulfonylphenyl]oxazole-4-carboxylate;
[0176] disodium 2-[4-(5-fluoro-3-methylbenzo[b]thiophene-2-sulfonylamino)-3-methanesulfonylphenyl]oxazole-4-carboxylate;
[0177] 2-[4-(5-fluoro-3-methylbenzo[b]thiophene-2-sulfonylamino)-3-methanesulfonylphenyl]thiazole-4-carboxylic acid;
[0178] methyl 4-(5-chloro-3-methylbenzo[b]thiophene-2-sulfonylamino)-3-methanesulfonylbenzoate;
[0179] sodium methyl 4-(5-chloro-3-methylbenzo[b]thiophene-2-sulfonylamino)-3-methanesulfonylbenzoate;
[0180] isopropyl 4-(5-chloro-3-methylbenzo[b]thiophene-2-sulfonylamino)-3-methanesulfonylbenzoate;
[0181] N-(4-acetyl-2-methanesulfonylphenyl)-5-chloro-3-methylbenzo[b]thiophene-2-sulfonamide; N-(4-benzoyl-2-methanesulfonylphenyl)-5-chloro-3-methylbenzo[b]thiophene-2-sulfonamide;
[0182] ethyl 4-(5-chloro-3-methylbenzo[b]thiophene-2-sulfonylamino-)-3-methanesulfonylbenzoate;
[0183] tert-butyl 4-(5-chloro-3-methylbenzo[b]thioph-ene-2-sulfonylamino)-3-methanesulfonylbenzoate;
[0184] methyl 4-(5-chloro-3-methylbenzo[b]thiophene-2-sulfonylamino)-3-ethanesulfonylbenzoate;
[0185] methyl 4-(5-chloro-3-methylbenzo[b]thiophene-2-sulfonylamino)-5-methanesulfonyl-2-methylbenzoate;
[0186] dimethyl 4-(5-chloro-3-methylbenzo[b]thiop-hene-2-sulfonylamino)isophthalate,
[0187] methyl 4-(5-chloro-3-methylbenzo[b]thio-phene-2-sulfonylamino)-3-methoxybenzoate;
[0188] methyl 4-(5-chloro-3-methylbenzo-[b]thiophene-2-sulfonylamino)-3-nitrobenzoate;
[0189] ethyl 4-(5-chloro-3-methylbenzo[b]thiophene-2-sulfonylamino) benzoate;
[0190] 5-chloro-N-(2,4-dimethanesulfonylphenyl)-3-methylbenzo[b]thiophene-2-sulfonamide;
[0191] N-(4-acetyl-2-nitrophenyl)-5-chloro-3-methylbenzo[b]thiophene-2-sulfonamide;
[0192] N-(4-benzoylphenyl)-5-chloro-3-methylbenzo-[b]thiophene-2-sulfonamide;
[0193] 5-chloro-N-(2-methanesulfonylphenyl)-3-methylbenzo[b]thiophene-2-sulfonamide;
[0194] methyl 4-(5-fluoro-3-methylbenzo[b]thiophe-ne-2-sulfonylamino)-3-methanesulfonylbenzoate;
[0195] methyl 4-(5-methyl-3-methylbenzo[b]thiophene-2-sulfonylamino)-3-methanesulfonylbenzoate;
[0196] N-(4-acetyl-2-methanesulfonylphenyl)-5-fluoro-3-methylbenzo[b]thiophene-2-sulfonamide;
[0197] methyl 4-(3-methylbenzo[b]thiophene-2-sulfonylamino)-3-methanesulfonylbenzoate;
[0198] methyl 2-[4-(5-chloro-3-methylbenzo[b]thiophene-2-sulfonylamino)-3-methanesulfonylphenyl]oxazole-4-carboxylate;
[0199] methyl 2-[4-(5-fluoro-3-methylbenzo[b]thiophene-2-sulfonylamino)-3-methanesulfonylphenyl]oxazole-4-carboxylate;
[0200] 5-fluoro-N-(2-methanesulfonyl-4-oxazol-5-ylphenyl)-3-methylbenzo[b]thiophene-2-sulfonamide;
[0201] methyl 2-[4-(5-fluoro-3-methylbenzo[b]thiophene-2-sulfonylamino)-3-methanesulfonylphenyl]thiazole-4-carboxylate;

[0202] N-[4-(4-chloromethylthiazol-2-yl)-2-methanesulfonylphenyl]-5-fluoro-3-methylbenzo[b]thiophene-2-sulfonamide;
[0203] 5-fluoro-N-[2-methanesulfonyl-4-(4-methylthiazol-2-yl)phenyl]-3-methylbenzo[b]thiophene-2-sulfonamide;
[0204] 5-fluoro-N-[2-methanesulfonyl-4-(2-methylthi-azol-4-yl)phenyl]-3-methylbenzo[b]thiophene-2-sulfonamide;
[0205] 5-fluoro-N-[2-methanesulfonyl-4-(5-methylthiazol-2-yl)phenyl]-3-methylbenzo[b]thiophene-2-sulfonamide;
[0206] 5-fluoro-N-[2-methanesulfonyl-4-(5-methoxy-4-methylthiazol-2-yl)phenyl]-3-methylbenzo[b]thiophene-2-sulfonamide;
[0207] 5-fluoro-N-[2-methanesulfonyl-4-(4,5-dimethylthiazol-2-yl)phenyl]-3-methyl-lbenzo[b]thiophene-2-sulfonamide;
[0208] N-[4-(4-chloromethyloxazol-2-yl)-2-methanesulfonylphenyl]-5-fluoro-3-meth-ylbenzo[b]thiophene-2-sulfonamide;
[0209] 5-fluoro-N-[2-methanesulfonyl-4-(4-methyloxazol-2-yl)phenyl]-3-methylbenzo[b]thiophene-2-sulfonamide;
[0210] 5-fluoro-N-[2-methanesulfonyl-4-(5-methoxy-4-methyloxazol-2-yl)phenyl]-3-methylbenzo[b]thiophene-2-sulfonamide;
[0211] 5-fluoro-N-[2-methanesulfonyl-4-(5-ethoxy-4-methyloxazol-2-yl)phenyl]-3-methylbenzo[b]thiophene-2-sulfonamide;
[0212] 5-fluoro-N-[2-methanesulfonyl-4-(4,5-dimethyloxazol-2-yl)phenyl]-3-methyl-lbenzo[b]thiophene-2-sulfonamide;
[0213] 5-fluoro-N-[2-methanesulfonyl-4-(5-methyl-loxazol-2-yl)phenyl]-3-methylbenzo[b]thiophene-2-sulfonamide; and
[0214] 5-fluoro-N-[2-methanesulfonyl-4-((E)-2-methanesulfinyl-2-methylsulfanylvinyl)phenyl]-3-methylbenzo[b]thiophene-2-sulfonamide.

[0215] US20040102384 discloses pyrrolidine derivatives including the following species:
[0216] N-[(1S)-2-((2S)-2-{N-[(1S)-1-(benzo[b]thiophen-3-ylmethyl)-3,3,3-trifluoro-2-oxopropyl]carbamoyl}pyrrolidinyl)-1-(methylethyl)-2-oxoethyl](3,5-dimethylisoxazol-4-yl)carboxamide; N-[(1S)-2-((2S)-2-{N-[(1S)-3,3,3-trifluoro-1-1-(2-naphthylmethyl)-2-oxopropyl]carbamoyl}pyrrolidinyl)-1-(methylethyl)-2-oxoethyl](3,5-dimethylisoxazol-4-yl)carboxamide; N-[(1S)-2-((2S)-2-{N-[(1S)-1-(benzo[b]thiophen-3-ylmethyl)-3,3,3-trifluoro-2-oxopropyl]carbamoyl}pyrrolidinyl)-1-ethyl-2-oxoethyl](3,5-dimethylisoxazol-4-yl)carboxamide; N-[1-((1R)-1-methylpropyl)(1S)-2-((2S)-2-{N-[(1S)-1-(benzo[b]thiophen-3-ylmethyl)-3,3,3-trifluoro-2-oxopropyl]carbamoyl}pyrrolidinyl)-2-oxoethyl](3,5-dimethylisoxazol-4-yl)carboxamide; N-[(1S)-2-((2S)-2-{N-[(1S)-1-(benzo[b]thiophen-3-ylmethyl)-3,3,3-trifluor-o-2-oxopropyl]carbamoyl}pyrrolidinyl)-1-methyl-2-oxoethyl](3,5-dimethyliso-xazol-4-yl)carboxamide; and N-[(1S)-2-((2S)-2-{N-[(1S)-1-(benzo[b]thiophen-1-3-ylmethyl)-3,3,3-trifluoro-2-oxopropyl]carbamoyl}pyrrolidinyl)-1-(methyl-ethyl)-2-oxoethyl](4-methyl(1,2,3-thiadiazol-5-yl))carboxamide.

[0217] US20040082544 discloses phosphonic acid compounds which are chymase inhibitors including:
[0218] [2-[3-[[[1-[(6-Hydroxy-2-naphthalenyl)carbonyl]-4-piperidinyl]methylamino]carbonyl]-2-naphthalenyl]-1-(1-naphthalenyl)-2-oxoethyl]-phosphonic acid;
[0219] [2-[3-[[Methyl(4-phenylcyclohexyl)-amino]carbonyl]-2-naphthalenyl]-1-(1-naphthalenyl)-2-oxoethyl]-phosphonic acid;
[0220] [2-[3-[[Methyl[1-(2-naphthalenylcarbonyl)-4-piperidinyl]amino]carbonyl]-2-naphthalenyl]-1-(1-naphthalenyl)-2-oxoethyl]-phosphonic acid;
[0221] [2-[3-[[[1-[(6-Methoxy-2-naphthalenyl)carbonyl]-3-pyrrolidinyl]methylamino]carbonyl]-2-naphthalenyl]-1-(1-naphthalenyl)-2-oxoethyl]-phosphonic acid;
[0222] [2-[3-[[[1-[(6-Bromo-2-naphthalenyl)carbonyl]-4-piperidinyl]methylamino]carbonyl]-2-naphthalenyl]-1-(1-naphthalenyl)-2-oxoethyl]-phosphonic acid;
[0223] [2-[3-[[[1-[(2E)-3-(4-Fluorophenyl)-1-oxo-2-propenyl]-3-pyrrolidinyl]methylamino]carbonyl]-2-naphthalenyl]-1-(1-naphthalenyl)-2-oxo ethyl]-phosphonic acid;
[0224] [2-[3-[[Methyl[1-[(2E)-1-oxo-3-phenyl-2-propenyl]-4-piperidinyl]amino]carbonyl]-2-naphthalenyl]-1-(1-naphthalenyl)-2-oxoethyl]-phosphonic acid;
[0225] [2-[3-[[Methyl[1-[(2E)-3-(4-methylphenyl)-1-oxo-2-propenyl]-4-piperidinyl]amino]carbonyl]-2-naphthalenyl]-1-(1-naphthalenyl)-2-oxoethyl]-phosphonic acid;
[0226] [2-[3-[[Methyl[1-[(2E)-1-oxo-3-[4-(trifluoromethyl)phenyl-]-2-propenyl]-4-piperidinyl]amino]carbonyl]-2-naphthalenyl]-1-(1-naphthalenyl)-2-oxoethyl]-phosphonic acid;
[0227] [2-[3-[[[1-[(2E)-3-[4-(Dimethylamino)phenyl]-1-oxo-2-propenyl]-4-piperidinyl]methylamino]carbonyl]-2-naphthalenyl]-1-(1-naphthalenyl)-2-oxoethyl]-phosphonic acid;
[0228] [2-[3-[[(1-Benzoyl-4-piperidinyl)methylamino]carbonyl]-2-naphthalenyl]-1-(1-naphthalenyl)-2-oxoethyl-1]-phosphonic acid;
[0229] [2-[3-[(Cyclohexylmethylamino)carbonyl]-2-naphthalenyl-]-1-(1-naphthalenyl)-2-oxoethyl]-phosphonic acid;
[0230] [2-[3-[[Methyl[1-[1-oxo-3-[4-(trifluoromethyl)phenyl]propyl]-4-piperidinyl]amino]carbonyl]-2-naphthalenyl]-1-(1-naphthalenyl)-2-oxoethyl]-phosphonic acid;
[0231] [2-[3-[[Methyl[1-(2-methyl-1-oxopropyl)-4-piperidinyl]amino]carbonyl]-2-naphthalenyl]-1-(1-naphthalenyl)-2-oxoethyl]-phosphonic acid;
[0232] [2-[3-[(Cyclopentylmethylamino)carbonyl]-2-naphthalenyl]-1-(1-naphthaleny-1)-2-oxoethyl]-phosphonic acid;
[0233] [2-[3-[[[4-(1,1-Dimethylethyl)cyclohexyl]methylamino]carbonyl]-2-naphthalenyl]-1-(1-naphthalenyl)-2-oxoethyl]-phosphonic acid;
[0234] [2-[3-[[(1-Acetyl-4-piperidinyl)methylamino]carbonyl]-2-naphthalenyl]-1-(1-naphthalenyl)-2-oxoethyl]-phosphonic acid;
[0235] [2-[3-[[Methyl(4-methylcyclohexyl)amino]carbonyl]-2-naphthalenyl]-1-(1-naphthalenyl)-2-oxoethyl]-phosphonic acid;
[0236] [2-[1-[[Methyl(tricyclo[3.3.1.1.sup.3,7]dec-1-ylmethyl)amino]carbonyl]-2-naphthalenyl]-1-(1-naphthalenyl)-2-oxoethyl]-phosphonic acid;
[0237] [2-[3-[[Methyl(4-phenyl-3-cyclohexenlyl)amino]carbonyl]-2-naphthalenyl]-1-(1-naphthalenyl)-2-oxoethyl]-phosphonic acid;
[0238] [1-(1-Naphthalenyl)-2-[3-[[[1-(2-naphthalenylcarbonyl)-4-piperidinyl]amino]carbonyl]-2-naphthalenyl]-2-oxoethyl]-phosphonic acid;
[0239] [1-(1-Naphthalenyl)-2-oxo-2-[3-[(4-phenyl-1-piperidinyl)carbonyl]-2-naphthalenyl]ethyl]-phosphonic acid;
[0240] [1-(1-Naphthalenyl)-2-oxo-2-[3-[(4-oxo-1-phenyl-1,3,8-triazaspiro[4.5]dec-8-yl)carbonyl]-2-naphthalenyl]ethyl]-phosphonic acid;
[0241] [2-[3-[[4-(4-Methoxyphenyl)-1-piperidinyl]carbonyl]-2-naphthalenyl]-1-(1-naphthalenyl)-2-oxoethyl]-phosphonic acid;
[0242] [2-[3-[[4-(3-Methoxyphenyl)-1-piperidinyl]carbonyl]-2-naphthalenyl]-1-(1-naphthalenyl)-2-oxoethyl]-phosphonic acid;
[0243] [2-[3-[[4-(2-Benzothiazolyl)-1-piperidinyl]carbonyl]-2-naphthalenyl]-1-(1-naphthalenyl)-2-oxoethyl]-phosphonic acid;
[0244] [1-(1-Naphthalenyl)-2-oxo-2-[3-[(3-phenyl-1-pyrrolidinyl)carbonyl]-2-naphthalenyl]ethyl]-phosphonic acid;
[0245] [1-(1-Naphthalenyl)-2-oxo-2-[3-[[3-(2-phenylethyl)-1-pyrrolidinyl]carbonyl]-2-naphthalenyl]ethyl]-phosphonic acid;
[0246] [2-[3-[[Methyl [1-(2-naphthalenylcarbonyl)-4-piperidinyl]amino]carbonyl]-2-naphthalenyl]-2-oxo-1-phenylethyl]-phosphonic acid;
[0247] [2-[2-[[Methyl [1-(2-naphthalenylcarbonyl)-4-piperidinyl]amino]carbonyl]phenyl]-1-(1-naphthalenyl)-2-oxoethyl]-phosphonic acid;
[0248] Methyl[2-[3-[[methyl[1-(2-naphthalenylcarbonyl)-4-piperidinyl]amino]carbonyl]-2-naphthalenyl]-1-(1-naphthalenyl)-2-oxoethyl]-phosphinic acid;
[0249] [1-(5-Chlorobenzo[b]thien-3-yl)-2-[3-[[methyl[1-(2-naphthalenylcarbonyl)-4-piperidinyl]amino]carbonyl]-2-naphthalenyl]-2-oxoethyl]-phosphonic acid; and
[0250] [2-[3-[[Methyl [1-(2-naphthalenylcarbonyl)-4-piperidinyl]amino]carbonyl]-2-naphthalenyl]-1-(1-naphthalenyl)-2-oxoethyl]-phosphonic acid methyl ester.

[0251] U.S. Pat. No. 5,306,824 discloses chymase inhibitors including: 7-biotinylamino-4-chloro-3-(2-phenylethoxy)isocoumarin and 7-(6-biotinylaminocaproyl)amino-4-chloro-3-(2-phenylethoxy)isocoumarin.

[0252] WO93/25574 discloses chymase inhibitor including: N-[(1,1-dimethylethoxy)carbonyl]-L-alanyl-N-[2,3-dioxo-3-methoxy-1-(phenylmethyl)propyl]-L-prolinamide; N-[(1,1-dimethylethoxy)carbonyl]-L-valyl-N-[2,3-dioxo-3-methoxy-1-(phenylmethyl)propyl]-L-prolinamide; N-[4-[N-methylamino]piperidine-1-carbonyl]-L-valyl-N-[3,3,3-trifluo-ro-2-oxo-1(S)-(phenylmethyl)propyl]-L-prolinamide hydrochloride; N-[4-[N-methylamino]piperidine-1-carbonyl]-L-valyl-N-[3,3,3-trifluo-ro-2-oxo-1(S)-(phenylmethyl)propyl]-L-prolinamide hydrochloride; N-[4-[N-methylamino]piperidine-1-carbonyl]-L-valyl-N-[2,3-dioxo-3-(-(1-methyl)ethoxy)-1(S)(phenylmethyl)propyl]-L-prolinamide hydrochloride; N-[4-[N-methylamino]piperidine-1-carbonyl-L-valyl-N-[2,3-dioxo-3-((−1-methyl)ethoxy)-1-(S)(phenylmethyl)propyl]-L-prolinamide hydrochloride; N-(4-oxopiperidine-1-carbonyl)-L-phenylalanyl-N-[2,3-dioxo-3-((1-me-thyl)ethoy)-1-(S)-(phenyl-methyl)propyl]-L-prolinamide; and N-[4-[N-methylamino]piperidine-1-carbonyl]-L-phenylalanyl-N-[3,3,3-trifluoro-2-oxo-1(S)-(phenyl-methyl)propyl]-L-prolinamide.

[0253] WO96/04248 discloses imidazoline derivatives including: 3-(3-Methoxycarbonylbenzensulfonyl)-1-phenyl-imidazolidine-2,4-dione; 3-(4-Chlorobenzenesulfonyl)-1-phenyl-imidazolidine-2,4-dione; 3-(3,4 Dimethylbenzenesulfonyl)-1-(3,4-dimethylphenyl)-imidazolidine-2,4-dione; 3-(4-Allyloxycarbonylbenzenesulfonyl)-1-(3,4-dimethylphenyl)-imidazolidine-2,4-dione; and 1-(3,4-Dichlorophenyl)-3-(2-naphthyl-sulfonyl)imidazolidine-2,4-dione.

[0254] Japanese Unexamined Patent Publication No. 9-31061 discloses hydantoin derivatives including: (5R)-5-Benzyl-3-(4-chlorobenzenesulfonyl)-imidazolidine-2,4-dione and (5R)-5-benzyl-3-(3,4-dimethylbenzenesulfonyl)-imidazolidine-2,4-dione.

[0255] WO97/11941 discloses quinazoline derivatives including: [7-Chloro-3-(4-chlorobenzenesulfonyl)-2,4(1H, 3H)-quinazolinedion-1-yl]acetanilide; [7-chloro-3-(4-chlorobenzenesulfonyl)-2,4(1H, 3H)-quinazolinedion-1-yl]acetic acid 4-hydroxyanilide; [7-chloro-3-(4-chlorobenzenesulfonyl)-2,4(1H, 3H)-quinazolinedion-1-yl]acetic acid 3-pyridinamide; [7-chloro-3-(4-chlorobenzenesulfonyl)-2,4(1H, 3H)-quinazolinedion-1-yl]acetic acid 4-pyridinamide; [7-chloro-3-(4-chlorobenzenesulfonyl)-2,4(1H, 3H)-quinazolinedion-1-yl]acetic acid 2-pyridinamide; 3-{[7-chloro-3-(4-chlorobenzenesulfonyl)-2,4(1H,3H)-quinazolinedion-1-yl]acetylamino}-N-ethylpyridinium iodide; [7-chloro-3-(4-chlorobenzenesulfonyl)-2,4(1H, 3H)-quinazolinedion-1-yl]acetic acid 5-indolamide; 3-{[7-chloro-3-(4-chlorobenzenesulfonyl)-2,4 (1H,3H)-quinazolinedion-1-yl]acetylamino}-(N-t-butoxycarbonylmethylpyridinium)bromide; 3-{[7-chloro-3-(4-chlorobenzenesulfonyl)-2,4(1H,3H)-quinazolinedion-1-yl]acetylamino)-N-carboxymethylpyridinium bromide; 3-[7-chloro-3-(4-chlorobenzenesulfonyl)-2,4(1H,3H)-quinazolinedion-1-yl]acetylaminophenoxy-phosphoric acid; 7-chloro-3-(4-chlorobenzenesulfonyl)-1-(3-pyridylmethyl)-2,4(1H,3H)-quinazolinedione; and [7-chloro-3-(4-chlorobenzenesulfonyl)-2,4-(1H, 3H)-quinazolinedion-1-yl]acetic acid 4-chloroanilide.

[0256] EP0713876 discloses triazine derivatives including: 5-(4-Chlorobenzylsulfinyl)-8-hydroxyimidazo-[1,2-d][1,2,4]triazine; 8-(4-chlorobenzyloxy)-5-(4-chlorobenzylsulfinyl)imidazo[1,2-d][1,2,-4]triazine; 8-(4-methylbenzyloxy)-5-(4-methylbenzylsulfinyl)imidazo[1,2-d][1,2,-4]triazine; 8-(3-chlorobenzyloxy)-5-(3-chlorobenzylsulfinyl)imidazo[1,2-d][1,2,-4]triazine; 1-(4-chlorobenzyloxy)-4-(4 chlorobenzylsulfinyl)-8-methylimidazo[1,-5-d][1,2,4]triazine; 2-(4-chlorobenzyl)-4-(4-chlorobenzylsulfinyl)-8-methylimidazo[1,5-d-][1,2,4]triazin-1(2H)-one; 5-(4-chlorobenzylsulfinyl)-8-ethoxycarbonyl-methyloxyimidazo[1,2-d]-[1,2,4]triazine; 4-(4-chlorobenzylsulfinyl)-1-(ethoxycarbonylmethyloxy)-8-methylimid-azo[1,5-d][1,2,4]triazine; and 2-ethoxycarbonylmethyl-4-(4-chlorobenzylsulfinyl)-8-methylimidazo[1-,5-d][1,2,4]triazin-1(2H)-one.

[0257] Japanese Unexamined Patent Publication No. 10-87567 discloses phenol derivatives including:
[0258] 1-[4-(3-Indolylacetoxy)benzoyl]-4-piperidine-carboxylic acid;
[0259] (S)-2-[4-(3-indolylacetoxy)benzoyl]-1,2,3,4-tetrahydroisoquinoline-3-carboxylic acid;
[0260] (S)-1-[4-(3-indolylacetoxy)benzoyl]-pyrrolidine-2-carboxylic acid; and
[0261] (S)-1-[4-(3-(2-methyl)indolylacetoxy)benzoyl]-pyrrolidine-2-carboxylic acid.

[0262] WO96/33974 discloses heterocyclic amide derivatives including 2-[5-Amino-2-(3,5-diaminophenyl)-6-oxo-1,6-dihydro-1-pyrimidyl]-N-(1-benzyl-3,3,3-trifluoro-2-oxopropyl)acetamide and 2-(5-hydroxysuccinylamino-6-oxo-2-phenyl-1,6-dihydro-1-pyrimidyl)-N-(1-benzyl-3,3,3-trifluoro-2-oxopropyl)acetamide.

[0263] Japanese Unexamined Patent Publication No. 9-124691 discloses chymase inhibitors including:
[0264] N-[4(S)—[N—[N-(tert-butyloxycarbonyl)-L-valyl-L-prolyl]amino]-2,2-d-ifluoro-3-oxo-5-phenylvaleryl]glycine;
[0265] 3-[N-[4(S)—[N—[N-(tert-butyloxycarbonyl)-L-glutamyl-L-prolyl]amino]-2,2-difluoro-3-oxo-5-phenylvaleryl]amino]benzoic acid; and
[0266] 3-[N-[4(S)—[N—[N-(phenylsulfonyl)-L-glutamyl-L-prolyl]amino]-2,2-di-fluoro-3-oxo-5-phenylvaleryl]amino]benzoic acid.

[0267] Japanese Unexamined Patent Publication No. 10-7661 discloses heterocyclic amide derivatives including 2-[1,6-Dihydro-5-hydroxysuccinylamino-2-(3-methylphenyl)-6-oxo-1 pyrimidinyl]-N-[1-benzyl-3,3-difluoro-2-oxo-3-[N-(carboxymethyl)carbamoyl]propyl]acetamide and 2-[1,6-dihydro-5-hydroxysuccinylamino-2-(3-methylphenyl)-6-oxo-1-py-rimidinyl]-N-[1-benzyl-3,3-difluoro-2-oxo-3-[N-(3-carboxyphenyl)carbamoyl]-propyl]acetamide.

[0268] Japanese Unexamined Patent Publication No. 10-53579 discloses chymase inhibitors including: 2-[5-[(Benzyloxycarbonyl)amino]-2-(4-fluorophenyl)-1,6-dihydro-6-ox-o-1-pyrimidinyl]-N-[2-(4,4,4-trifluoro-3-oxo-1-phenyl)butyl]acetamide; 2-[5-amino-2-(4-fluorophenyl)-1,6-dihydro-6-oxo-1-pyrimidinyl]-N-[2-(4,4,4-trifluoro-3-oxo-1-phenyl)butyl]acetamide; 2-[5-amino-2-phenyl-1,6-dihydro-6-oxo-1-pyrimidinyl]-N-[2-(4,4,4-tr-ifluoro-3-oxo-1-phenyl)butyl]acetamide; 2-(5-amino-1,6-dihydro-6-oxo-2-phenyl-1-pyrimidinyl)-N-[2-(3-methox-ylcarbonyl-3-oxo-1-phenyl)butyl]acetamide; and 2-(3-amino-2,3-dihydro-2-oxo-5-phenyl-1H-1,4-benzodiazepin-1-yl)-N-[2-(4,4,4-trifluoro-3-oxo-1-phenyl)butyl]acetamide.

[0269] WO 98/09949 discloses acetamide derivatives useful as chymase inhibitors including:

2-(5-Amino-6-oxo-2-phenyl-1,6-dihydropyrimidin-1-yl)-N-(2,3-dioxo-1-phenylmethyl-6-(2-pyridyloxy)}hexylacetamide.2HCl; 2-{6-oxo-2-phenyl-5-(4-pyridylmethyloxycarbonylamino)-1,6-dihydropyrimidin-1-yl}-N-(2,3-dioxo-1-phenylmethyl-6-(2-pyridyloxy)}hexylacetamide; 2-(5-formylamino-6-oxo-2-phenyl-1,6-dihydropyrimidin-1-yl)-N-{2,3-d-ioxo-1-phenylmethyl-6-(2-pyridyloxy)}hexylacetamide; and 2-(5-benzylaminosulfonylamino-6-oxo-2-phenyl-1,6-dihydropyrimidin-1-yl)-N-{2,3-dioxo-1-phenylmethyl-6-(2-pyridyloxy)}hexylacetamide.

[0270] WO00/005204 discloses monocyclic β-lactams as chymase inhibitors.

[0271] WO98/18794 discloses heterocyclic amide derivatives that are chymase inhibitors.

### Anti-Chymotrypsin and Anti-Chymotrypsin-Like Enzyme Antibodies

[0272] As discussed above, antibodies directed against chymotrypsin or a chymotrypsin-like enzyme can be used in any of the methods described herein. Useful antibodies inhibit the ability of the enzyme to cleave guanylin, for example, by binding to the active site of the enzyme or by interfering with the interaction between the enzyme and guanylin.

[0273] There a number of commercially available sources of anti-chymotrypsin antibodies including: Research Diagnostics Inc. (Flanders, N.J.; e.g., catalog nos. RDI-CHYMOTabm and RDI-CHYMOT-AG), Biodesign International (Saco, Me.; e.g., catalog nos. H55601M, H55136M), Chemicon International, Inc (Temecula, Calif.; e.g., catalog no. MAB1476), Fitzgerald Industries International (Concord, Mass. e.g. catalog no. 20-CR79), QED Biosciences (San Diego, Calif.; catalog nos. 13601, 13602, 13603, and 13604), and US Biological (Swampscott, Mass.; e.g., catalog nos. C5070, C5070-01, C5070-02, and C5070-07).

[0274] Chymase and cathepsin are examples of chymotrypsin-like enzymes. There a number of commercially available sources of anti-chymase antibodies including: Abcam (Cambridge, UK; e.g., catalog no. ab2377), Calbiochem (San Diego, Calif.; e.g., catalog no. 444904), Chemicon International, Inc (Temecula, Calif.; e.g., catalog nos. MAB1254B and MAB1254), Lab Vision (Fremont, Calif.; e.g., catalog no. MS-1217), Novus Biologicals (Littleton, Colo.; e.g., catalog no. ab2377), Serotec, Inc. (Raleigh, N.C.; e.g., catalog no. MCA1930), and US Biological (Swampscott, Mass.; e.g. catalog no. M2414). There a number of commercially available sources of anti-cathepsin antibodies including: Abcam (Cambridge, UK; e.g. catalog nos. ab15988 and ab8816), BD Biosciences Pharmingen (San Diego, Calif.; e.g. catalog no. 554248), Biodesign International (Saco, Me.; e.g. catalog nos. K50806R and K90050C), Biovision (Mountain View, Calif.; e.g. catalog no. 3370-200), Calbiochem (San Diego, Calif.; e.g. catalog no. 219358), and Chemicon International, Inc (Temecula, Calif.; e.g. catalog no. MAB1054).

[0275] The antibodies can be a whole antibody (e.g., IgM, IgG, IgA, IgD, or IgE) molecule that is generated by any one of a variety of methods that are known in the art. The antibody can be made in or derived from any of a variety of species, e.g., humans, non-human primates (e.g., monkeys, baboons, or chimpanzees), rabbits, rats, and mice. The antibody can be a purified or a recombinant antibody. Also useful are antibody fragments and chimeric antibodies and humanized antibodies derived from non-human (e.g., mouse, rat, gerbil, or hamster) antibodies. Also useful are antibody fragments that bind antigen, e.g., Fab, F(ab′)₂, Fv, and single chain Fv (scFv) fragments. An scFv fragment is a single polypeptide chain that includes both the heavy and light chain variable regions of the antibody from which the scFv is derived. In addition, diabodies (Poljak (1994) Structure 2(12):1121-1123; Hudson et al. (1999) J. Immunol. Methods 23(1-2):177-189) and intrabodies (Huston et al. (2001) Hum. Antibodies 10(3-4):127-142; Wheeler et al. (2003) Mol. Ther. 8(3):355-366; Stocks (2004) Drug Discov. Today 9(22): 960-966) can be used.

[0276] Antibody fragments that contain the binding domain of the molecule can be generated by known techniques. For example: F(ab′)₂ fragments can be produced by pepsin digestion of antibody molecules; and Fab fragments can be generated by reducing the disulfide bridges of F(ab′)₂ fragments or by treating antibody molecules with papain and a reducing agent. See, e.g., National Institutes of Health, 1 Current Protocols In Immunology, Coligan et al., ed. 2.8, 2.10 (Wiley Interscience, 1991). scFv fragments can be produced, for example, as described in U.S. Pat. No. 4,642,334.

[0277] Chimeric and humanized monoclonal antibodies can be produced by recombinant DNA techniques known in the art, for example, using methods described in Robinson et al., International Patent Publication PCT/US86/02269; Akira et al., European Patent Application 184,187; Taniguchi, European Patent Application 171,496; Morrison et al., European Patent Application 173,494; Neuberger et al., PCT Application WO 86/01533; Cabilly et al., U.S. Pat. No. 4,816,567; Cabilly et al., European Patent Application 125,023; Better et al. (1988) Science 240, 1041-43; Liu et al. (1987) J. Immunol. 139, 3521-26; Sun et al. (1987) PNAS 84, 214-18; Nishimura et al. (1987) Canc. Res. 47, 999-1005; Wood et al. (1985) Nature 314, 446-49; Shaw et al. (1988) J. Natl. Cancer Inst. 80, 1553-59; Morrison, (1985) Science 229, 1202-07; Oi et al. (1986) BioTechniques 4, 214; Winter, U.S. Pat. No. 5,225,539; Jones et al. (1986) Nature 321, 552-25; Veroeyan et al. (1988) Science 239, 1534; and Beidler et al. (1988) J. Immunol. 141, 4053-60.

[0278] Human antibodies can be produced in transgenic mice (Jakovits 1999 Exp Opin Invest Drugs 7:607; Green 199 J. Immunol Methods 231:11) and can be obtained commercially from Medarex, Inc. (Princeton, N.J.) or Abgenix, Inc. (Fremont, Calif.). Human antibodies can also be obtained using phage display libraries (Cambridge Antibody Technology; Cambridge, UK)

[0279] Prodrugs of Inhibitors of Chymotrypsin-Like Enzymes

[0280] Prodrug forms of any of the inhibitors of a chymotrypsin-like enzyme described herein that are acids can be created by replacing the acidic proton with R_wherein R is selected from a straight chain or branched C₁ to C₆ alkyl (C₁, C₂, C₃, C₄, C₅, C₆), alkenyl, alkynyl, or a C₆ aryl optionally independently substituted with one or more halogen (Cl, F, Br, I), —OH, —C(O)OH, or —NH₃. In cases where there are two or more acidic protons (e.g., certain phosphoric acids), one or more can be replaced. Alternatively R can be selected from

[chemical structure]

[0281] wherein R₁ is selected from H or a branched or straight chain C₁ to C₆ (C₁, C₂, C₃, C₄, C₅, C₆) alkyl, alkenyl, alkynyl, aryl, cycloalkyl, or arylalkyl optionally independently substituted with one or more halogen —OH, —C(O)OH, or —NH₃. R₂ is selected from H, straight or branched chain C₁ to C₆ (C₁, C₂, C₃, C₄, C₅, C₆) alkyl.

[0282] Among the inhibitors of chymotrypsin-like enzymes that are acids and might be converted to prodrugs in this manner are:
[0283] (4-[1-[[bis-(4-methylphenyl)-methyl]-carbamoyl]-3-(2-ethoxybenzyl)-4-oxo-azetidine-2-yloyl]-benzoic acid;
[0284] 4-((1-((1-naphthyl)methyl)-5-methoxybenzimidazole)-2-ylthio)butyric acid;
[0285] 4-((1-naphthyl)methyl)-5,6-difluorobenzimidazole)-2-ylthio)butyric acid;
[0286] 4-(1-((1-naphthyl)methyl)-5-cyanobenzimidazole-2-ylthio)butyric acid;
[0287] 4-(1-((1-naphthyl)methyl)-5-cyanobenzimidazole-2-yl)-3,3-dimethylbutyric acid;
[0288] 4-(1-((1-naphthyl)methyl)benzimidazole-2-ylthio)butyric acid;
[0289] Sodium 4-(1-((1-naphthyl)methyl)benzimidazole-2-ylthio)butyrate;
[0290] 4-(1-((8-methyl-1-naphthyl)methyl)benzimidazole-2-ylthio)butyric acid;
[0291] 4-(1-((8-methyl-1-naphthyl)methyl)-5,6-dimethylbenzimidazole-2-ylthio)-butyric acid;
[0292] 5-(1-((1-naphthyl)methyl)benzimidazole-2-ylthio)-4-oxo-3,3-dimethylvaleric acid;
[0293] 4-(1-((1-naphthyl)methyl)-5-trifluoromethylbenzimidazole-2-ylthio)butyric acid;
[0294] 4-(1-((2,5-dimethylphenyl)methyl)-5-methoxybenzimidazole-2-ylthio)butyric acid;
[0295] 4-(1-((2,5-dimethylphenyl)methyl)-5-cyanobenzimidazole-2-ylthio)butyric acid;
[0296] 4-(1-((1-naphthyl)methyl)-5-ethoxybenzimidazole-2-ylthio)butyric acid;
[0297] 3-(1-((1-naphthyl)methyl)-benzimidazole-2-ylthio)propanoic acid; 5-(1-((1-naphthyl)methyl)-benzimidazole-2-ylthio)valeric acid;
[0298] 4-(1-((1-naphthyl)methyl)-5,6-dimethylbenzimidazole-2-ylthio)butyric acid;
[0299] 4(1-((1-naphthyl)methyl)-5,6-dimethylbenzimidazole-2-ylsulfonyl)butyric acid;
[0300] 4-(1-((2,5-dimethylphenyl)methyl)-7-azabenzimidazole-2-ylthio)butyric acid;
[0301] (+)-2-{4-[(7-chloro-2,4(1H,3H)-quinazolin-3-yl)sulfonyl]phenyl}butyric acid;
[0302] 2-{3-[(7-chloro-2,4(1H,3H)-quinazolinedion-3-yl)sulfonyl]phenylaminocarbonyl}propionic acid;
[0303] 3-{3-[(7-chloro-2,4(1H,3H)-quinazolinedion-3-yl)sulfonyl]phenyl}acrylic acid;
[0304] 4-[(7-chloro-2,4(1H,3H)-quinazolinedion-3-yl)sulfonyl]salicylic acid;
[0305] 4-[(7-chloro-2,4(1H,3H)-quinazolinedion-3-yl)sulfonyl]salicylic acid monosodium salt;
[0306] 4-[(7-chloro-2,4(1H,3H)-quinazolinedion-3-yl)sulfonyl]anthranilic acid;
[0307] 4-[(7-chloro-2,4(1H,3H)-quinazolinedion-3-yl)sulfonyl]anthranilic acid monosodium salt;
[0308] 4-[(2,4(1H,3H)-quinazolinedion-3-yl)sulfonyl]salicylic acid;
[0309] 5-[(7-chloro-2,4(1H,3H)-quinazolinedion-3-yl)sulfonyl]salicylic acid;
[0310] 4-[(7-chloro-2,4(1H,3H)-quinazolinedion-3-yl)sulfonyl]-1-hydroxy-nanhthalene-2-carboxylic acid;
[0311] 5-[(7-chloro-2,4(1H,3H)-quinazolinedion-3-yl)sulfonyl]anthranilic acid;
[0312] 4-[(7-methoxy-2,4(1H,3H)-quinazolinedion-3-yl)sulfonyl]anthranilic acid;
[0313] (+)-7-[(7-chloro-2,4(1H,3H)-quinazolinedion-3-yl)sulfonyl]-2-oxo-1H,3H-quinoline-3-carboxylic acid;
[0314] (+)-6-[(7-chloro-2,4(1H,3H)-quinazolinedion-3-yl)sulfonyl]-3-oxo-1,4-benzoxazine-2-carboxylic acid;
[0315] 4-[(7-hydroxy-2,4(1H,3H)-quinazolinedion-3-yl)sulfonyl]anthranilic acid;
[0316] 4-[(7-chloro-2,4(1H,3H-quinazolinedion-3-yl)sulfonyl]-2-N-propionylanthranilic acid;
[0317] 4-[(6-chloro-2,4(1H,3H)-quinazolinedion-3-yl)sulfonyl]anthranilic acid;
[0318] 4-[(7-chloro-2,4(1H,3H)-quinazolinedion-3-yl)sulfonyl]-2-N-methanesulfonylanthranilic acid;
[0319] 2-[4-(5-chloro-3-methylbenzo[b]thiophene-2-sulfonylamino)-3-methanesulfonylphenyl]oxazole-4-carboxylic acid;
[0320] 2-[4-(5-fluoro-3-methylbenzo[b]thiophene-2-sulfonylamino)-3-methanesulfon-ylphenyl]oxazole-4-carboxylic acid;
[0321] disodium 2-[4-(5-chloro-3-methylbenzo[-b]thiophene-2-sulfonylamino)-3-methanesulfonylphenyl]oxazole-4-carboxylate;
[0322] disodium 2-[4-(5-fluoro-3-methylbenzo[b]thiophene-2-sulfonylamino)-3-met-hanesulfonylphenyl]oxazole-4-carboxylate;
[0323] 2-[4-(5-fluoro-3-methylbenzo[b]thiophene-2-sulfonylamino)-3-methanesulfonylphenyl]thiazole-4-carboxylic acid;
[0324] [2-[3-[[[1-[(6-Hydroxy-2-naphthalenyl)carbonyl]-4-piperidinyl]methylamino]carbonyl]-2-naphthalenyl]-1-(1-naphthalenyl)-2-oxoethyl]-phosphonic acid;
[0325] [2-[3-[[Methyl(4-phenylcyclohexyl)-amino]carbonyl]-2-naphthalenyl]-1-(1-naphthalenyl)-2-oxoethyl]-phosphonic acid;
[0326] [2-[3-[[Methyl[1-(2-naphthalenylcarbonyl)-4-piperidinyl]amino]carbonyl]-2-naphthalenyl]-1-(1-naphthalenyl)-2-oxoethyl]-phosphonic acid;
[0327] [2-[3-[[[1-[(6-Methoxy-2-naphthalenyl)carbonyl]-3-pyrrolidinyl]methylamino]carbonyl]-2-naphthalenyl]-1-(1-naphthalenyl)-2-oxoethyl]-phosphonic acid;
[0328] [2-[3-[[[1-[(6-Bromo-2-naphthalenyl)carbonyl]-4-piperidinyl]methylamino]carbonyl]-2-naphthalenyl]-1-(1-naphthalenyl)-2-oxoethyl]-phosphonic acid;
[0329] [2-[3-[[[1-[(2E)-3-(4-Fluorophenyl)-1-oxo-2-propenyl]-3-pyrrolidinyl]methylamino]carbonyl]-2-naphthalenyl]-1-(1-naphthalenyl)-2-oxoethyl]-phosphonic acid;
[0330] [2-[3-[[Methyl[1-[(2E)-1-oxo-3-phenyl-2-propenyl]-4-piperidinyl]amino]carbonyl]-2-naphthalenyl]-1-(1-naphthalenyl)-2-oxoethyl]-phosphonic acid;
[0331] [2-[3-[[Methyl[1-[(2E)-3-(4-methylphenyl)-1-oxo-2-propenyl]-4-piperidinyl]amino]carbonyl]-2-naphthalenyl]-1-(1-naphthalenyl)-2-oxoethyl]-phosphonic acid;
[0332] [2-[3-[[Methyl[1-[(2E)-1-oxo-3-[4-(trifluoromethyl)phenyl-]-2-propenyl]-4-piperidinyl]amino]carbonyl]-2-naphthalenyl]-1-(1-naphthalenyl)-2-oxoethyl]-phosphonic acid;
[0333] [2-[3-[[[1-[(2E)-3-[4-(Dimethylamino)phenyl]-1-oxo-2-propenyl]-4-piperidinyl]methylamino]carbonyl]-2-naphthalenyl]-1-(1-naphthalenyl)-2-oxoethyl]-phosphonic acid;
[0334] [2-[3-[[(1-Benzoyl-4-piperidinyl)methylamino]carbonyl]-2-naphthalenyl]-1-(1-naphthalenyl)-2-oxoethyl-1]-phosphonic acid;
[0335] [2-[3-[(Cyclohexylmethylamino)carbonyl]-2-naphthalenyl-]-1-(1-naphthalenyl)-2-oxoethyl]-phosphonic acid;
[0336] [2-[3-[[Methyl[1-[1-oxo-3-[4-(trifluoromethyl)phenyl]propyl]-4-piperidinyl]amino]carbonyl]-2-naphthalenyl]-1-(1-naphthalenyl)-2-oxoethyl]-phosphonic acid;
[0337] [2-[3-[[Methyl[1-(2-methyl-1-oxopropyl)-4-piperidinyl]amino]carbonyl]-2-naphthalenyl]-1-(1-naphthalenyl)-2-oxoethyl]-phosphonic acid;
[0338] [2-[3-[(Cyclopentylmethylamino)carbonyl]-2-naphthalenyl]-1-(1-naphthaleny-1)-2-oxoethyl]-phosphonic acid;
[0339] [2-[3-[[[4-(1,1-Dimethylethyl)cyclohexyl]methylamino]carbonyl]-2-naphthalenyl]-1-(1-naphthalenyl)-2-oxoethyl]-phosphonic acid;
[0340] [2-[3-[[(1-Acetyl-4-piperidinyl)methylamino]carbonyl]-2-naphthalenyl]-1-(1-naphthalenyl)-2-oxoethyl]-phosphonic acid;
[0341] [2-[3-[[Methyl(4-methylcyclohexyl)amino]carbonyl]-2-naphthalenyl]-1-(1-naphthalenyl)-2-oxoethyl]-phosphonic acid;
[0342] [2-[1-[[Methyl(tricyclo[3.3.1.1.s-up.3,7]dec-1-ylmethyl)amino]carbonyl]-2-naphthalenyl]-1-(1-naphthalenyl)-2-oxoethyl]-phosphonic acid;
[0343] [2-[3-[[Methyl(4-phenyl-3-cyclohexen 1 yl)amino]carbonyl]-2-naphthalenyl]-1-(1-naphthalenyl)-2-oxoethyl]-phosphonic acid;
[0344] [1-(1-Naphthalenyl)-2-[3-[[[1-(2-naphthalenylcarbonyl)-4-piperidinyl]amino]carbonyl]-2-naphthalenyl]-2-oxoethyl]-phosphonic acid;
[0345] [1-(1-Naphthalenyl)-2-oxo-2-[3-[(4-phenyl-1-piperidinyl)carbonyl]-2-naphthalenyl]ethyl]-phosphonic acid;
[0346] [1-(1-Naphthalenyl)-2-oxo-2-[3-[(4-oxo-1-phenyl-1,3,8-triazaspiro[4.5]dec-8-yl)carbonyl]-2-naphthalenyl]ethyl]-phosphonic acid;
[0347] [2-[3-[[4-(4-Methoxyphenyl)-1-piperidinyl]carbonyl]-2-naphthalenyl]-1-(1-naphthalenyl)-2-oxoethyl]-phosphonic acid;
[0348] [2-[3-[[4-(3-Methoxyphenyl)-1-piperidinyl]carbonyl]-2-naphthalenyl]-1-(1-naphthalenyl)-2-oxoethyl]-phosphonic acid;
[0349] [2-[3-[[4-(2-Benzothiazolyl)-1-piperidinyl]carbonyl]-2-naphthalenyl]-1-(1-naphthalenyl)-2-oxoethyl]-phosphonic acid;
[0350] [1-(1-Naphthalenyl)-2-oxo-2-[3-[(3-phenyl-1-pyrrolidinyl)carbonyl]-2-naphthalenyl]ethyl]-phosphonic acid;
[0351] [1-(1-Naphthalenyl)-2-oxo-2-[3-[[3-(2-phenylethyl)-1-pyrrolidinyl]carbonyl]-2-naphthalenyl]ethyl]-phosphonic acid;
[0352] [2-[3-[[Methyl [1-(2-naphthalenylcarbonyl)-4-piperidinyl]amino]carbonyl]-2-naphthalenyl]-2-oxo-1-phenylethyl]-phosphonic acid;
[0353] [2-[2-[[Methyl [1-(2-naphthalenylcarbonyl)-4-piperidinyl]amino]carbonyl]phenyl]-1-(1-naphthalenyl)-2-oxoethyl]-phosphonic acid;
[0354] Methyl[2-[3-[[methyl[1-(2-naphthalenylcarbonyl)-4-piperidinyl]amino]carbonyl]-2-naphthalenyl]-1-(1-naphthalenyl)-2-oxoethyl]-phosphinic acid;
[0355] [1-(5-Chlorobenzo[b]thien-3-yl)-2-[3-[[methyl[1-(2-naphthalenylcarbonyl)-4-piperidinyl]amino]carbonyl]-2-naphthalenyl]-2-oxoethyl]-phosphonic acid;
[0356] 1-[4-(3-Indolylacetoxy)benzoyl]-4-piperidine-carboxylic acid;
[0357] (S)-2-[4-(3-indolylacetoxy)benzoyl]-1,2,3,4-tetrahydroisoquinoline-3-carboxylic acid;
[0358] (S)-1-[4-(3-indolylacetoxy)benzoyl]-pyrrolidine-2-carboxylic acid;
[0359] (S)-1-[4-(3-(2-methyl)indolylacetoxy)benzoyl]-pyrrolidine-2-carboxylic acid.
[0360] N-[4(S)—[N—[N-(tert-butyloxycarbonyl)-L-valyl-L-prolyl]amino]-2,2-d-ifluoro-3-oxo-5-phenylvaleryl]glycine;
[0361] 3-[N-[4(S)—[N—[N-(tert-butyloxycarbonyl)-L-glutamyl-L-prolyl]amino]-2,2-difluoro-3-oxo-5-phenylvaleryl]amino]benzoic acid; and
[0362] 3-[N-[4(S)—[N—[N-(phenylsulfonyl)-L-glutamyl-L-prolyl]amino]-2,2-di-fluoro-3-oxo-5-phenylvaleryl]amino]benzoic acid.

[0363] In certain cases an inhibitor of a chymotrypsin-like enzyme having a carboxylic acid group can be converted into a symmetrical anhydride having the structure Z-C(O)—O—C(O)-Z where Z represents the remainder of the inhibitor. Two different inhibitors can be converted into a non-symmetrical anhydride having the structure Z′-C(O)—O—C(O)-Z where Z′ and Z represent the remainder of the two different inhibitors.

[0364] Prodrug forms of any of the inhibitors of a chymotrypsin-like enzyme described herein that are alcohols can be created by replacing the H of the —OH group with R wherein R is selected from a straight chain or branched C₁ to C₆ alkyl (C₁, C₂, C₃, C₄, C₅, C₆), alkenyl, alkynyl, or a C₆ aryl optionally independently substituted with one or more halogen (Cl, F, Br, I), —OH, —C(O)OH, —NH₃. Alternatively R can be selected from

[chemical structure]

wherein R₁ is selected from H or a branched or straight chain C₁ to C₆ (C₁, C₂, C₃, C₄, C₅, C₆) alkyl, alkenyl, alkynyl, aryl, cycloalkyl, or arylalkyl optionally independently substituted with one or more halogen —OH, —C(O)OH, or —NH₃.

[0365] Among the inhibitors of chymotrypsin-like enzymes that are alcohols and might be converted to prodrugs in this manner are: 7-chloro-3-(3-hydroxybenzenesulfonyl)-2,4(1H,3H)-quinazolinedione;
[0366] 3-(4-hydroxybenzenesulfonyl)-7-chloro-2,4(1H,3H)-quinazolinedione;
[0367] 3-(3-carboxymethyl-benzenesulfonyl)-7-chloro-2,4(1H,3H)-quinazolinedione;
[0368] 3-(4-carboxymethyl-benzenesulfonyl)-7-chloro-2,4(1H,3H)-quinazolinedione;
[0369] 3-[(3-carboxymethylaminophenyl)sulfonyl]-7-chloro-2,4(1H,3H)-quinazolinedione;
[0370] 5-chloro-N-(4-hydroxymethyl-2-methanesulfonylphenyl)-3-methylbenzo[b]thiophene-2-sulfonamide;
[0371] 5-fluoro-N-[4-(4-hydroxymethyloxazol-2-y-l)-2-methanesulfonylphenyl]-3-methylbenzo[b]thiophene-2-sulfonamide;
[0372] 5-fluoro-N-[4-(4-hydroxymethylthiazol-2-yl)-2-methanesulfonylphenyl]-3-m-ethylbenzo[b]thiophene-2-sulfonamide; and
[0373] [2-[3-[[[1-[(6-Hydroxy-2-naphthalenyl)carbonyl]-4-piperidinyl]methylamino]carbonyl]-2-naphthalenyl]-1-(1-naphthalenyl)-2-oxoethyl]-phosphonic acid.

[0374] Prodrug forms of inhibitors of chymotrypsin-like enzymes that are peptides can be generenated in the manner described above for peptide inhibitors of chymotrypsin.

### Chymotrypsin Activity Assays

[0375] Any standard chymotrypsin activity assay can be used to assess known chymotrypsin inhibitors and compounds which may inhibit chymotrypsin.

[0376] For example chymotrypsin activity can be measured using N-Glutaryl-Lphenylalanine p-nitroanilide (Sigma-Aldrich, Inc; Catalog No. 49738) as a substrate and cc-Chymotrypsin from bovine pancreas (EC 3 2 1. 1; Sigma-Aldrich; Catalog No. C4129) in an assay described by Kakade et al. (Cereal Chemistry 51:376 (1974)). In this assay, chymotrypsin hydrolyzes the substrate N-Glutaryl-L-phenylalanine-p-nitroanilide present in excess. The release of p-nitroanilide, a yellow dye, is measured spectrophotometrically.

[0377] An additional chymotrypsin assay is described by Kourteva et al. (Analytical Biochemistry 162:345-9, 1987). This assay is rapid and particularly useful for assessing higher molecular weight inhibitors. Briefly, a test compound is spotted onto an agar film which contains TLCK-chymotrypsin. Enzyme inhibition is visualized as colorless zones on a pink background after the films are stained with a chromogenic substrate N-acetyl-DL-phenylalanine-β-naphthyl ester. A variation on this assay can be use to assess trypsin activity and this can be useful for assessing the selectivity of an inhibitor.

### Guanylin Degradation Assay

[0378] Since guanylin is susceptible to digestion by chymotrypsin, chymotrypsin activity can be assayed based on guanylin cleavage. Guanylin (Sigma, G-116) or a guanylin variant were resuspended in 5 ml of 100 mM Tris-HCl, 2 mM CaCl₂, pH 7.8 at 30° C. for a final concentration of 0.01 mg/ml. From this stock, six (6) 500 μl aliquots were prepared in 2 ml Eppendorf tubes and labeled “Control”, “T0”, “T15”, “T30”, “T60”, and “T180”, with “T_” representing timepoints, in minutes. 5 μl of a 10 mM chymostatin (Sigma, C7268) stock (5 mg of chymostatin resuspended in 824 μl of DMSO) was added to the “Control” samples and all samples were incubated for 5 minutes at 30° C. Chymostatin inhibits chymotrypsin activity and this sample served as a negative control. Next, 20 μl of a chymotrypsin (Sigma, C6423) enzyme solution (0.01 mg/ml bovine chymotrypsin enzyme in 1 mM HCl, 2 mM Calcium Chloride) were added to the samples and mixed by inversion. Samples are incubated at 30° C. The “T0” samples were collected at time=0 minutes by adding 5 μl of a 10 mM chymostatin stock and subsequently stored at −80° C. All other timepoint samples are taken in a similar manner, with the “Control” samples collected parallel to the time=180 minutes samples. Determination of sensitivity to digestion by chymotrypsin was determined by LCMS analysis and by in vitro activity in the T84 cGMP assays described below.

[0379] For LC/MS analysis, samples were injected (10 μL) onto a reverse phase HPLC column (Waters Atlantis dC₁₈ 1.0×150 mm, 3 um particle size, 186001283) at 20° C., and were eluted with a reverse phase gradient (Mobile Phase A: 5 mM NH₄OAc in dH₂O, 0.1% formic acid, Mobile Phase B: 5 mM NH₄OAc in 80% methanol and 20% dH₂O, 0.1% formic acid; Initial condition of 5% B, ramping to 95% B over 35 minutes, and holding for 3 minutes, then returning to initial conditions over the next 7 minutes, all at a flow rate of 0.07 mL/min.). At 45 minutes, the gradient was at initial conditions of 5% B and held for 15 minutes. Guanylin samples were detected by quadrapole-time of flight mass spectrometry in TOF scan mode (cone voltage=30 V; collision=4 eV). Chymotrypsin sensitivity was determined by the loss of the initial mass species and the formation of the product mass species, with respect to time. Instrument response was converted into percentage units by comparison of the response of the initial mass versus the product mass, with “T0” representing total response of initial mass for all samples.

### Guanylins and Guanylin Variants

[0380] When it is desirable to potentiate the activity of guanylin by the administration of a chymotrypsin inhibitor or prodrug derivative thereof or some other guanylin potentiating agent, it may also be desirable to administer guanylin or a biologically active variant or fragment thereof. A human guanylin is depicted in FIG. 5 along with various other guanylins. A number of guanylin variants are depicted in FIGS. 3, 4 and 6.

[0381] As noted above, immature guanylin can include a pre-sequence and/or a prosequence. Immature guanylin is processed to yield the mature protein. Immature guanylin generally includes a so-called “pre sequence” followed by a “pro sequence” and then the mature polypeptide sequence. The pre sequence is important for secretion of the polypeptides. The pro sequence may be important for proper folding of the mature protein under at least some conditions. Various pre sequences and pro sequences are discussed in great detail below in the section describing guanylin and guanylin variants.

[0382] Mature guanylin has disulfide bonds between the first and third cysteines and between the second and fourth cysteines. The pro sequence of a guanylin is thought to be important for proper disulfide bond formation. Moreover, guanylin is thought to exist as an A-isomer and a B-isomer. The A- and B-isomers have the same disulfide bond connectivity but differ in three-dimensional conformation. It is thought that only the A-isomer has biological activity (see Lauber 2005 Protein and Peptide Letters 12:153). Pro sequences might be important for formation of the active A-isomer. In addition, such sequences can protect the mature polypeptide from premature degradation in the body or stabilize a particular isomer of the polypeptide. In some cases, such sequences may influence oligomerization. Accordingly, in some embodiments, a guanylin or gaunylin variant is produced and/or administered in a form that includes a pro sequence, a pre sequence or both a pre sequence and a pro sequence (a “prepro sequence”) at the amino terminus. Thus, useful polypeptides can include a pre sequence, a pro sequence or a prepro sequence preceding (amino-terminal to) a GC-C receptor agonist polypeptide described herein. FIG. 6 depicts the pre sequence (SEQ ID NOs: ______-______), pro sequence (SEQ ID NOs: ______-______), prepro sequence (SEQ ID NOs: ______-______), and mature sequence for a number guanylin polypeptides as well as various combinations thereof (e.g., a polypeptide consisting of a pre sequence and a mature polypeptide).

[0383] One or more of a pre sequence, a pro sequence and a prepro sequence can be present at the amino terminus of a GC-C receptor agonist polypeptide described herein. Thus, described herein are polypeptides comprising, consisting of or consisting essentially of (from amino terminus to carboxy terminus) one or more of: a pre sequence (SEQ ID NOs: ______-______; pre sequences; FIG. 6) and a pro sequence (SEQ ID NOs: ______-______; pro sequences; FIG. 6) followed by a GC-C receptor agonist polypeptide described herein, e.g., mature human guanylin. Among the useful GC-C receptor polypeptides that can modified by the addition of pre, pro, and/or prepro sequences are those depicted in the FIGS. 3-6 as well as those depicted below:

| | |
|---|---|
| PGTCEICASAACTGC | (SEQ ID NO: 4690) |
| PGTCEICATAACTGC | (SEQ ID NO: 4691) |
| PGTCEICANAACTGC | (SEQ ID NO: 4692) |
| PGTCEICAQAACTGC | (SEQ ID NO: 4693) |
| PGTCEICARAACTGC | (SEQ ID NO: 4694) |
| PGTCEICAEAACTGC | (SEQ ID NO: 4695) |
| PGTCEICADAACTGC | (SEQ ID NO: 4696) |
| PGTCEICAGAACTGC | (SEQ ID NO: 4697) |
| PGTCEICAAAACTGC | (SEQ ID NO: 4698) |
| PGTCEICAMAACTGC | (SEQ ID NO: 4699) |
| PGTCEICAIAACTGC | (SEQ ID NO: 4700) |
| PGTCEICALAACTGC | (SEQ ID NO: 4701) |
| PGTCEICAVAACTGC | (SEQ ID NO: 4702) |
| PGTCEICAHAACTGC | (SEQ ID NO: 4703) |
| PGTCEGICAYAACTGC | (SEQ ID NO: 4704) |
| PGTCEIGCAYAACTGC | (SEQ ID NO: 4705) |
| PGTCEICGAYAACTGC | (SEQ ID NO: 4706) |
| PGTCEICAGYAACTGC | (SEQ ID NO: 4707) |
| PGTCEICAYGAACTGC | (SEQ ID NO: 4708) |
| PGTCEICAYAGACTGC | (SEQ ID NO: 4709) |
| PGTCEICAYAAGCTGC | (SEQ ID NO: 4710) |
| PGTCEICAYAACGTGC | (SEQ ID NO: 4711) |
| PGTCEICAYAACTGGC | (SEQ ID NO: 4712) |
| PGTCAEICAYAACTGC | (SEQ ID NO: 4713) |
| PGTCEAICAYAACTGC | (SEQ ID NO: 4714) |
| PGTCEIACAYAACTGC | (SEQ ID NO: 4715) |
| PGTCEICAAYAACTGC | (SEQ ID NO: 4716) |
| PGTCEICAYAAACTGC | (SEQ ID NO: 4717) |
| PGTCEICAYAACATGC | (SEQ ID NO: 4718) |
| PGTCEICAYAACTAGC | (SEQ ID NO: 4719) |
| PGTCEICAYAACTGAC | (SEQ ID NO: 4720) |
| PGTCAEICAAYAACTGC | (SEQ ID NO: 4721) |
| PGTCEAICAAYAACTGC | (SEQ ID NO: 4722) |
| and | |
| PGTCEIACAAYAACTGC | (SEQ ID NO: 4723) |

[0384] In some cases it may be desirable to have a polypeptide that includes a pre sequence from a first guanylin polypeptide and a pro sequence from a second guanylin polypeptide. In other cases, the pre sequence and the pro sequence are from the same guanylin polypeptide.

[0385] Useful polypeptides can include a naturally-occurring or variant guanylin polypeptide in its mature form, as a prepro polypeptide (includes, from amino terminus to carboxy terminus, pre sequence, pro sequence and mature polypeptide), as a propolypeptide (includes, from amino terminus to carboxy terminus, pro sequence and mature polypeptide) or as a prepolypeptide (includes, from amino terminus to carboxy terminus, pre sequence and mature polypeptide). FIG. 6 depicts these various guanylin polypeptides. In some cases a polypeptide will be produced, e.g., recombinantly, with a pre sequence and/or a pro sequence. In certain cases the pre sequence and/or pro sequence is removed prior to administration of the polypeptide to a patient. In other cases the prepropolypeptide, propolypeptide or the prepolypeptide is administered to the patient. The pre sequence and/or the pro sequence may stabilize the polypeptide or an active isomer thereof, facilitate efficient folding of the polypeptide or protect the polypeptide from degradation in the patient's body. Thus, pre sequences, pro sequences and/or prepro sequences that do not significantly interfere with GC-C receptor agonist activity can be beneficial. In some cases the pre sequence and/or the pro sequence are removed by physiological processes after administration.

[0386] In some cases useful polypeptides will include only a portion (e.g., 20, 15, 12, 11, 10, 9, 8, 6, 5, 4 or fewer) of the amino acids of a pre sequence (SEQ ID NOs: ______-______), pro sequence (SEQ ID NOs: ______-______), prepro sequence (SEQ ID NOs: ______-______).

[0387] As can be seen in FIG. 6, pro sequences include Cys residues that may form a disulfide bond. For example, many pro sequences include two Cys residues separated by 12 amino acids. These Cys residues may form a disulfide bond. These Cys residues can be replaced by homocysteine, penicillamine, 3-mercaptoproline (Kolodziej et al. 1996 Int J Pept Protein Res 48:274); β, β-dimethylcysteine (Hunt et al. 1993 Int J Pept Protein Res 42:249) or diaminopropionic acid (Smith et al. 1978 J Med Chem 21:117) to form alternative internal cross-links at the positions of the normal disulfide bonds.

Activation of the Intestinal GC-C Receptor by Guanylin (T84 cGMP Assay)

[0388] The ability of guanylin to activate the intestinal GC-C receptor was assessed in an assay employing the T84 human colon carcinoma cell line (American Type Culture Collection (Bethesda, Md.). For the assays cells were grown to confluency in 24-well culture plates with a 1:1 mixture of Ham's F12 medium and Dulbecco's modified Eagle's medium (DMEM), supplemented with 5% fetal calf serum and were used at between passages 54 and 60.

[0389] Briefly, monolayers of T84 cells in 24-well plates were washed twice with 1 ml/well DMEM, then incubated at 37° C. for 10 min with 0.45 ml DMEM containing 1 mM isobutylmethylxanthine (IBMX), a cyclic nucleotide phosphodiesterase inhibitor. Test peptides (50 μl) were then added and incubated for 30 minutes at 37° C. The media was aspirated and the reaction was then terminated by the addition of ice cold 0.5 ml of 0.1N HCl. The samples were held on ice for 20 minutes and then evaporated to dryness using a heat gun or vacuum centrifugation. The dried samples were resuspended in 0.5 ml of phosphate buffer provided in the Cayman Chemical Cyclic GMP EIA kit (Cayman Chemical, Ann Arbor, Mich.). Cyclic GMP was measured by EIA according to procedures outlined in the Cayman Chemical Cyclic GMP EIA kit. FIG. 1 shows that guanylin stimulated cGMP activity decreases over time in the presence of chymotrypsin. This activity was retained when the chymotrypsin inhibitor, chymostatin was present. FIG. 2 shows the results of LC/MS analysis of the processing of guanylin by chymotrypsin in the guanylin degradation assay.

### Intestinal GC-C Receptor Binding Assay

[0390] The ability of peptides and other agents to bind to the intestinal GC-C receptor can be tested as follows. Cells of the T84 human colon carcinoma cell line (American Type Culture Collection (Bethesda, Md.) are grown to confluence in 24-well culture plates with a 1:1 mixture of Ham's F12 medium and Dulbecco's modified Eagle's medium (DMEM), supplemented with 5% fetal calf serum. Cells used in the assay are typically between passages 54-60. Briefly, T84 cell monolayers in 24-well plates are washed twice with 1 ml of binding buffer (DMEM containing 0.05% bovine serum albumin and 25 mM HEPES, pH 7.2), then incubated for 30 min at 37° C. in the presence of mature radioactively labeled E. coli ST peptide and the test material at various concentrations. The cells are then washed four times with 1 ml of DMEM and solubilized with 0.5 ml/well 1N NaOH. The level of radioactivity in the solubilized material is then determined using standard methods.

In some cases, intestinal epithelial cell preparations may be used instead of T84 cells to assess receptor binding.

### Murine Gastrointestinal Transit (GIT) Assay

[0391] In order to determine if anagent has an effect on intestinal motility, the agent can be tested in the murine gastrointestinal transit (GIT) assay (Moon et al. Infection and Immunity 25:127, 1979). This assay can also be used to determine the effect of an agent of the invention on intestinal motility. In this assay, charcoal, which can be readily visualized in the gastrointestinal tract is administered to mice after the administration of a test compound. The distance traveled by the charcoal is measured and expressed as a percentage of the total length of the colon.

[0392] Mice are fasted with free access to water for 12 to 16 hours before the treatment with peptide or control buffer. A test agent is orally administered in buffer (20 mM Tris pH 7.5) seven minutes before being given an oral dose of 5% Activated Carbon (Aldrich 242276-250G). Control mice are administered buffer only before being given a dose of Activated Carbon. After 15 minutes, the mice are sacrificed and their intestines from the stomach to the cecum are dissected. The total length of the intestine as well as the distance traveled from the stomach to the charcoal front is measured for each animal and the results are expressed as the percent of the total length of the intestine traveled by the charcoal front. Results are reported as the average of 10 mice±standard deviation. A comparison of the distance traveled by the charcoal between the mice treated with the agent versus the mice treated with vehicle alone is performed using a Student's t test and a statistically significant difference is considered for P<0.05. Positive controls for this assay may include Zelnorm®, a drug approved for IBS that is an agonist for the serotonin receptor 5HT4.

### Suckling Mouse Model of Intestinal Secretion (SuMi Assay)

[0393] Guanylin potentiating agentscan be tested for their ability to increase intestinal secretion using a suckling mouse model of intestinal secretion. In this model a test compound is administered to suckling mice that are between seven and nine days old. After the mice are sacrificed, the gastrointestinal tract from the stomach to the cecum is dissected (“guts”). The remains (“carcass”) as well as the guts are weighed and the ratio of guts to carcass weight is calculated. If the ratio is above 0.09, one can conclude that the test compound increases intestinal secretion. Controls for this assay may include Zelnorm®

### Phenylbenzoquinone-Induced Writhing Model

[0394] The PBQ-induced writhing model can be used to assess whether administration of a an agent reduces pain. This model is described by Siegmund et al. (1957 Proc. Soc. Exp. Bio. Med. 95:729-731). Briefly, one hour after oral dosing with a test compound, morphine or vehicle, 0.02% phenylbenzoquinone (PBQ) solution (12.5 mL/kg) is injected by intraperitoneal route into the mouse. The number of stretches and writhings are recorded from the 5^{th} to the 10^{th} minute after PBQ injection, and can also be counted between the 35^{th} and 40^{th} minute and between the 60^{th} and 65^{th} minute to provide a kinetic assessment. The results are expressed as the number of stretches and writhings (mean±SEM) and the percentage of variation of the nociceptive threshold calculated from the mean value of the vehicle-treated group. The statistical significance of any differences between the treated groups and the control group is determined by a Dunnett's test using the residual variance after a one-way analysis of variance (P<0.05) using SigmaStat Software.

[0395] Effect on Bowel Habits

[0396] Guanylin potentiating agent of the invention can be administered to mammals (e.g. humans) to determine the effect on bowel habits (including Bristol Stool Form Scale score, stool frequency (number of stools per week), ease of passage and stool weight). A guanylin potentiating agent of the invention is administered in a single dose or multiple doses (for example, once daily over a consecutive 7 day period) and alterations in bowel habit are evaluated (for each collected bowel movement), for example, prior to dose, during dosage (for multiple dosing), and postdose.

[0397] The Bristol Stool Form Scale is: 1: Separate hard lumps, like nuts

[0398] 2: Sausage-shaped but lumpy

[0399] 3: Like a sausage or snake but with cracks on its surface

[0400] 4: Like a sausage or snake, smooth and soft

[0401] 5: Soft blobs with clear-cut edges

[0402] 6: Fluffy pieces with ragged edges, a mushy stool

[0403] 7: Watery, no solid pieces

[0404] The scale used to determine ease of passage is:

[0405] 1. Manual disimpaction

[0406] 2 Enema needed

[0407] 3. Straining needed

[0408] 4. Normal

[0409] 5. Urgent without pain

[0410] 6. Urgent with pain

[0411] 7. Incontinent

[0412] Rat Model of Postoperative Ileus.

[0413] Female CD rats are used to test the effect of guanylin potentiating agents of the invention on delayed transit induced by abdominal surgery and manual manipulation of the small intestine. Groups of at least nine rats undergo abdominal surgery under isoflurane anesthesia. Surgery consists of laparotomy and 5 minutes of gentle manual intestinal massage. Following recovery from anesthesia, rats are dosed orally with either guanylin potentiating agent (for example, 10 μg/kg) of the invention or vehicle (20 mM Tris) in a volume of 300 μl. 1 hour after dosing, intestinal transit rate is measured. Animals are again dosed with 300 μl of the test article followed immediately by 500 μl of a charcoal meal (10% charcoal, 10% gum arabic in water). To calculate the distance of the small intestine traveled by the charcoal front, after 20 minutes, the total length of the intestine as well as the distance traveled from the stomach to the charcoal front are measured for each animal.

[0414] Effect on cGMP Levels and Secretion in Ligated Loops Rodent Models

[0415] The effect of guanylin potentiating agents of the invention on cGMP levels and secretion are studied by injecting guanylin potentiating agents of the invention directly into an isolated loop in either wild-type or GC-C KO mice. This is done by surgically ligating a loop in the small intestine of the mouse. The methodology for ligated loop formation is similar to that described in London et al. 1997 Am J Physiol p. G93-105. The loop is roughly centered and is a length of 1-3 cm. The loops are injected with 100 μl of either pontentiating agent or vehicle (20 mM Tris, pH 7.5 or Krebs Ringer, 10 mM Glucose, HEPES buffer (KRGH)). Following a recovery time of 90 minutes the loops are excised. Weights are recorded for each loop before and after removal of the fluid contained therein. The length of each loop is also recorded. A weight to length ratio (W/L) for each loop is calculated to determine the effects of the guanylin potentiating agent of the invention on secretion.

[0416] To determine the effect of the guanylin potentiating agent of the invention on cGMP activity, fluid from the loop is collected in ice-cold trichloracetic acid (TCA) and stored at −80° C. for use in an assay to measure cGMP levels in the fluid. Intestinal fluid samples are TCA extracted, and cyclic GMP is measured by EIA according to procedures outlined in the Cayman Chemical Cyclic GMP EIA kit (Cayman Chemical, Ann Arbor, Mich.) to determine cyclic GMP levels in the intestinal fluid of the mouse in the presence of either guanylin potentiating agent of the invention or vehicle.

[0417] The effects of guanylin potentiating agents of the invention on cGMP levels and secretion in ligated loops in female CD rats can also be determined using protocols similar to those described above. In the case of the rat, however four loops of intestine are surgically ligated. The first three loops are distributed equally in the small intestine and the fourth loop is located in colon. Loops are 1 to 3 centimeters, and are injected with 200 μL of either peptide/agonist of the invention (5 μg) or vehicle (Krebs Ringer, 10 mM glucose, HEPES buffer (KRGH)).

[0418] Effect on Diuresis and Natriuresis

[0419] The effect of guanylin potentiating agents of the invention on diuresis and natriuresis can be determined using methodology similar to that described in WO06/001931 (examples 6 (p. 42) and 8 (p. 45)). Briefly, the guanylin potentiating agent of the invention (180-pmol) is infused for 60 min into a group of 5 anesthetized rats. Given an estimated rat plasma volume of 10 mL, the infusion rate is approximately 3 pmol/mL/min. Blood pressure, urine production, and sodium excretion are monitored for approximately 40 minutes prior to the infusion, during the infusion, and for approximately 50 minutes after the infusion to measure the effect of the peptide/GC-C agonist on diuresis and natriuresis. For comparison, a control group of five rats is infused with regular saline. Urine and sodium excretion can be assessed. Dose response can also be determined. Guanylin potentiating agent of the invention is infused intravenously into rats over 60 minutes. Urine is collected at 30 minute intervals up to 180 minutes after termination of guanylin potentiating agent infusion, and urine volume, sodium excretion, and potassium excretion are determined for each collection interval. Blood pressure is monitored continuously. For each dose a dose-response relationship for urine volume, sodium and potassium excretion can be determined. Plasma concentration of the peptide/GC-agonist is also determined before and after iv infusion.

### Colonic Hyperalgesia Animal Models

[0420] Hypersensitivity to colorectal distension is a common feature in patients with IBS and may be responsible for the major symptom of pain. Both inflammatory and non-inflammatory animal models of visceral hyperalgesia to distension have been developed to investigate the effect of compounds on visceral pain in IBS and can be used to assess the impact of a compound such as a chymotrypsin inhibitor or other agent administered alone with guanylin or biologically active variant or fragment thereof.

[0421] I. Trinitrobenzenesulphonic Acid (TNBS)-Induced Rectal Allodynia Model

[0422] Male Wistar rats (220-250 g) are premedicated with 0.5 mg/kg of acepromazine injected intraperitoneally (IP) and anesthetized by intramuscular administration of 100 mg/kg of ketamine. Pairs of nichrome wire electrodes (60 cm in length and 80 μm in diameter) are implanted in the striated muscle of the abdomen, 2 cm laterally from the white line. The free ends of electrodes are exteriorized on the back of the neck and protected by a plastic tube attached to the skin. Electromyographic (EMG) recordings are started 5 days after surgery. Electrical activity of abdominal striated muscle is recorded with an electroencephalograph machine (Mini VIII, Alvar, Paris, France) using a short time constant (0.03 sec.) to remove low-frequency signals (<3 Hz).

[0423] Ten days post surgical implantation, trinitrobenzenesulphonic acid (TNBS) is administered to induce rectal inflammation. TNBS (80 mg kg⁻¹ in 0.3 ml 50% ethanol) is administered intrarectally through a silicone rubber catheter introduced at 3 cm from the anus under light diethyl-ether anesthesia, as described (Morteau et al. 1994 Dig Dis Sci 39:1239). Following TNBS administration, rats are placed in plastic tunnels where they are severely limited in mobility for several days before colorectal distension (CRD). Experimental compound is administered one hour before CRD which is performed by insertion into the rectum, at 1 cm of the anus, a 4 cm long balloon made from a latex condom (Gue et al, 1997 Neurogastroenterol. Motil. 9:271). The balloon is fixed on a rigid catheter taken from an embolectomy probe (Fogarty). The catheter attached balloon is fixed at the base of the tail. The balloon, connected to a barostat is inflated progressively by step of 15 mmHg, from 0 to 60 mmHg, each step of inflation lasting 5 min. Evaluation of rectal sensitivity, as measured by EMG, is performed before (1-2 days) and 3 days following rectal instillation of TNBS.

[0424] The number of spike bursts that corresponds to abdominal contractions is determined per 5 min periods. Statistical analysis of the number of abdominal contractions and evaluation of the dose-effects relationships is performed by a one way analysis of variance (ANOVA) followed by a post-hoc (Student or Dunnett tests) and regression analysis for ED50 if appropriate.

[0425] II. Stress-Induced Hyperalgesia Model

[0426] Male Wistar Rats (200-250 g) are surgically implanted with nichrome wire electrodes as in the TNBS model. Ten days post surgical implantation, partial restraint stress (PRS), is performed as described by Williams et al. for two hours (Williams et al. 1988 Gastroenterology 64:611). Briefly, under light anaesthesia with ethyl-ether, the foreshoulders, upper forelimbs and thoracic trunk are wrapped in a confining harness of paper tape to restrict, but not prevent body movements. Control sham-stress animals are anaesthetized but not wrapped. Thirty minutes before the end of the PRS session, the animals are administered test-compound or vehicle. Thirty minutes to one hour after PRS completion, the CRD distension procedure is performed as described above for the TNBS model with barostat at pressures of 15, 30, 45 and 60 mm Hg. Statistical analysis on the number of bursts is determined and analyzed as in the TNBS model above.

### TNBS Colitis in Rats

[0427] This model is described in, for example, Morris et al. (Gastroenterology 96(3):795-803, 1989). Briefly, to induce chronic colonic inflammation in rats, a rubber catheter is inserted rectally into the colon such that the tip is 8 cm proximal to the anus. Next, 2,4,6-Trinitrobenzenesulfonic acid (TNBS 5-30 mg) dissolved in 50% ethanol is instilled into the lumen of the colon through the rubber catheter. Rats are euthanized at various times (24 hours and 1-8 weeks) following rectal TNBS administration and the colon tissue is examined for damage, inflammation and ulceration. Colon weight and colonic myeloperoxidase (MPO) activity are also assessed. Complete protocol details for an alternative model can be found in Dohi et al. (Gastroenterology 119:724-733, 2000). Briefly, mice (C57BL/6; 40 μg/g and Balb/c 36 μg/g) are given a solution of TNBS dissolved in a mixture of phosphate-buffered saline and then mixed with an equal volume of ethanol for a final concentration of 2% TNBS in 50% ethanol. On days 0 and 7, the TNBS enema is administered to mice anesthetized with ketamine and xylazine via a glass microsyringe equipped with a gastric intubation needle. Tissues and cells are assessed 3 days later (day 10).

### Oxazolone Colitis in Mice

[0428] This model is described in, for example, Kojima et al. (J. Pharmacol. Sci. 96:307-313, 2004). Briefly, a metal catheter is inserted 4 cm into the lumen of the colon via the anus in the anesthetized mouse. Oxazolone solution (0.15 mL/mouse) is administered into the colon through the catheter. Colonic tissues from mice on days 0 (before colitis induction), 1, 2, 4 and 7 are collected and examined for evidence of colitis and myeloperoxidase (MPO) activity.

### Colitis Models

[0429] In general any model of colitis can be used, in particular, mouse or rat models in which a chemical, hapten or antigen is used to induce colitis. Other colitis models are described Elson et al. (Gastroenterology 109:1344-1367, 1995) and Kim et al. (Scand. J. Gastroenterol 27:529-537, 1992).

### Oral Antigen-Induced Gastrointestinal Allergy in Mice

[0430] Complete protocol details for one model can be found in, for example, Hogan et al. (Nat Immunol. 2(4):353-60, 2001). Briefly, mice are sensitized by intraperitoneal injection with ovalbumin (50 μg) in alum (1 mg) in 0.9% sterile saline on day 0. On days 12 and 15, mice are orally administered with encapsulated ovalbumin or placebo enteric-coated beads (20 mg) followed by oral administration of acidified water (300 μl, pH 2.0). In some experiments, mice are intragastrically challenged with soluble ovalbumin (1 mg) in PBS (200 μl) or control PBS on days 12 and 15. Mice are euthanized and parmeteres are measured 72 hours after the last antigen challenge. The gastrointestinal tract tissue is examined for eosinophilic inflammation. Complete protocol details for another model can be found in Forbes et al. (Gastroenterology 127:105-118, 2004). Briefly, mice are sensitized by an intraperitoneal injection of 50 μg of ovalbumin/1 mg of alum in 200 μL of 0.9% sterile saline on day 0. On days 12, 14, and 16, mice are orally administered 20 mg of either encapsulated ovalbumin enteric coated beads or placebo beads, followed by 200 uL of acidified water 9, pH 2.0). 72 hours after the last antigen challenge, mice are euthanized and disease parameters are measured in various ways. In some experiments, mice are intraperitoneally injected on days 0, 1, and 3 with either rat IgG2b-depleting anti-D4 onoclonal antibody or rat IgG control antibody. Methacholine-induced bronchial hyperresponsiveness is determined on day 4.

### Experimental Oral Allergen-Induced Diarrhea

[0431] Complete protocol details can be found in, for example, Brandt et al. (J. Clin. Invest. 112(11):1666-1677, 2003). Briefly, mice are sensitized twice, 2 weeks apart, with 50 μg of ovalbumin/1 mg of aluminum potassium sulfate adjuvant by intraperitoneal injection. Two weeks later, mice are held in the supine position 3 times a week and orally administered 250 μL of sterile saline that contains up to 50 mg of ovalbumin. Before each intragastric challenge, mice are deprived of food for 3-4 hours with the aim of limiting antigen degraduation in the stomach. Diarrhea is assessed by visually monitoring mice for up to 1 hour following intragastric challenge.

### Animal Models of Hypertension

[0432] Various animal models of hypertenstion can be used to screen guanylin potentiating agents. In general, hypertension can be induced in rats in at least four ways, including: genetically-induced, environmentally-induced, pharmacologically-induced, and renal-induced. A variety of rodent hypertension models are described in Pinto et al. (1998 Cardiovascular Research 39:77-88) and the references cited therein. One of the most widely used rodent models of hypertension is the Spontaneously Hypertensive Rat (SHR). Other models include: (1) the two-kidney one-clip, (2) transgenic rats overexpressing the murine Ren2 gene, (3) the Dahl salt sensitive rat, and (4) DOCA (deoxycorticosterone acetate)-salt model.

### Administration of Guanylin Potentiating Agents

[0433] For treatment of gastrointestinal disorders, hypertension and other disorders, guanylin potentiating agents and other agents (and compounds co-administered with the guanylin potentiating agent) can be administered orally, e.g., as a tablet or cachet containing a predetermined amount of the active ingredient, pellet, gel, paste, syrup, bolus, electuary, slurry, capsule; sachet; “flash dosage”; powder; lyophilized powder; granules; as a solution or a suspension in an aqueous liquid or a non-aqueous liquid; as an oil-in-water liquid emulsion or a water-in-oil liquid emulsion, via a liposomal formulation (see, e.g., EP 736299) or in some other form. Orally administered compositions can include binders, lubricants, inert diluents, lubricating, surface active or dispersing agents, flavoring agents, and humectants. Orally administered formulations such as tablets may optionally be coated or scored and may be formulated so as to provide sustained, delayed or controlled release of the active ingredient therein. The agent can also be administered rectally, e.g., by suppository.

[0434] Guanylin potentiating agents can be co-administered with other therapeutic agents, including but not limited to those described herein. The guanylin potentiating agent can be administered together with guanylin or a guanylin variant or analogue. For treatment of gastrointestinal disorders, the agent can be administered orally. The agents can also be administered by rectal suppository. For the treatment of disorders outside the gastrointestinal tract such as hypertension, congestive heart failure and benign prostatic hypertrophy, the agents are preferably administered parenterally or orally. In some cases, the therapeutic agents preferably reach the small and/or large intestine in order to effectively reduce the activity of chymotrypsin that proteolytically digests guanylin. If the agent is to be administered orally, it is preferably formulated with an enteric coating. For example, the formulation can be provided with a non-porous, gastric acid-resistant polymer coating, e.g., a coating that is insoluble or only slightly soluble at pH 1.5 to pH 5, but is soluble above pH 5 or pH 5.5 up to or above pH 9. The polymer can include, for example, hydroxypropyl methyl cellulose phthalate, cellulose acetate phthalate, diethyl phthalate, dibutyl phthalate, and acrylic based polymers. The formulation can also be buffered by inclusion of a buffering agent, for example, sodium bicarbonate, potassium carbonate, potassium bicarbonate, ammonium carbonate, tromethamine, di(tris)hydroxymethylaminomethane) carbonate, tris-glycine, di-arginine, tri-arginine, poly-arginine, di-lysine, tri-lysine, poly-lysine, diethylamine and triethanolamine. It can be desirable for the buffering agent to provide a pH of from about 7 to about 9 in the small intestine or large intestine of a human patient. The formulation can also include a disintegrant, e.g., ursodiol, starch, modified starches, microcrystalline cellulose and propylene glycol alginate.

[0435] The guanylin potentiating agents can be used alone or in combination with other agents. For example, they can be administered together with an agent for treating a gastrointestinal disorder. They can be administered in a combination therapy with guanylin or a biologically active variant or fragment thereof. The guanylin potentiating agents can be administered together with an analgesic peptide or compound. The analgesic peptide or compound can be covalently attached to a guanylin potentiating agent described herein or it can be a separate agent that is administered together with or sequentially with a guanylin potentiating agent in a combination therapy.

[0436] Combination therapy can be achieved by administering two or more agents, e.g., a guanylin potentiating agent and an agent for treating a gastrointestinal disorder or an analgesic peptide or compound, each of which is formulated and administered separately, or by administering two or more agents in a single formulation. Other combinations are also encompassed by combination therapy. For example, two agents can be formulated together and administered in conjunction with a separate formulation containing a third agent. While the two or more agents in the combination therapy can be administered simultaneously, they need not be. For example, administration of a first agent (or combination of agents) can precede administration of a second agent (or combination of agents) by minutes, hours, days, or weeks. Thus, the two or more agents can be administered within minutes of each other or within 1, 2, 3, 6, 9, 12, 15, 18, or 24 hours of each other or within 1, 2, 3, 4, 5, 6, 7, 8, 9, 10, 12, 14 days of each other or within 2, 3, 4, 5, 6, 7, 8, 9, or 10 weeks of each other. In some cases even longer intervals are possible. While in many cases it is desirable that the two or more agents used in a combination therapy be present in within the patient's body at the same time, this need not be so.

[0437] Combination therapy can also include two or more administrations of one or more of the agents used in the combination. For example, if agent X and agent Y are used in a combination, one could administer them sequentially in any combination one or more times, e.g., in the order X-Y-X, X-X-Y, Y-X-Y, Y-Y-X, X-X-Y-Y, etc.

[0438] The agents, alone or in combination, can be combined with any pharmaceutically acceptable carrier or medium. Thus, they can be combined with materials that do not produce an adverse, allergic or otherwise unwanted reaction when administered to a patient. The carriers or mediums used can include solvents, dispersants, coatings, absorption promoting agents, controlled release agents, and one or more inert excipients (which include starches, polyols, granulating agents, microcrystalline cellulose, diluents, lubricants, binders, disintegrating agents, and the like), etc. If desired, tablet dosages of the disclosed compositions may be coated by standard aqueous or nonaqueous techniques.

[0439] Compositions may also optionally include other therapeutic ingredients, anti-caking agents, preservatives, sweetening agents, colorants, flavors, desiccants, plasticizers, dyes, and the like. Any such optional ingredient must be compatible with the compound of the invention to insure the stability of the formulation.

[0440] The composition may contain other additives as needed, including for example lactose, glucose, fructose, galactose, trehalose, sucrose, maltose, raffinose, maltitol, melezitose, stachyose, lactitol, palatinite, starch, xylitol, mannitol, myoinositol, and the like, and hydrates thereof, and amino acids, for example alanine, glycine and betaine, and peptides and proteins, for example albumen.

[0441] Examples of excipients for use as the pharmaceutically acceptable carriers and the pharmaceutically acceptable inert carriers and the aforementioned additional ingredients include, but are not limited to binders, fillers, disintegrants, lubricants, anti-microbial agents, and coating agents such as:

BINDERS: corn starch, potato starch, other starches, gelatin, natural and synthetic gums such as acacia, sodium alginate, alginic acid, other alginates, powdered tragacanth, guar gum, cellulose and its derivatives (e.g., ethyl cellulose, cellulose acetate, carboxymethyl cellulose calcium, sodium carboxymethyl cellulose), polyvinyl pyrrolidone, methyl cellulose, pre-gelatinized starch (e.g., STARCH 1500® and STARCH 1500 LM®, sold by Colorcon, Ltd.), hydroxypropyl methyl cellulose, microcrystalline cellulose (e.g. AVICEL™, such as, AVICEL-PH-101™, -103™ and -105™, sold by FMC Corporation, Marcus Hook, Pa., USA), or mixtures thereof,
FILLERS: talc, calcium carbonate (e.g., granules or powder), dibasic calcium phosphate, tribasic calcium phosphate, calcium sulfate (e.g., granules or powder), microcrystalline cellulose, powdered cellulose, dextrates, kaolin, mannitol, silicic acid, sorbitol, starch, pre-gelatinized starch, or mixtures thereof,
DISINTEGRANTS: agar-agar, alginic acid, calcium carbonate, microcrystalline cellulose, croscarmellose sodium, crospovidone, polacrilin potassium, sodium starch glycolate, potato or tapioca starch, other starches, pre-gelatinized starch, clays, other algins, other celluloses, gums, or mixtures thereof,
LUBRICANTS: calcium stearate, magnesium stearate, mineral oil, light mineral oil, glycerin, sorbitol, mannitol, polyethylene glycol, other glycols, stearic acid, sodium lauryl sulfate, talc, hydrogenated vegetable oil (e.g., peanut oil, cottonseed oil, sunflower oil, sesame oil, olive oil, corn oil and soybean oil), zinc stearate, ethyl oleate, ethyl laurate, agar, syloid silica gel (AEROSIL 200, W.R. Grace Co., Baltimore, Md. USA), a coagulated aerosol of synthetic silica (Deaussa Co., Plano, Tex. USA), a pyrogenic silicon dioxide (CAB-O-SIL, Cabot Co., Boston, Mass. USA), or mixtures thereof,
ANTI-CAKING AGENTS: calcium silicate, magnesium silicate, silicon dioxide, colloidal silicon dioxide, talc, or mixtures thereof,
ANTIMICROBIAL AGENTS: benzalkonium chloride, benzethonium chloride, benzoic acid, benzyl alcohol, butyl paraben, cetylpyridinium chloride, cresol, chlorobutanol, dehydroacetic acid, ethylparaben, methylparaben, phenol, phenylethyl alcohol, phenoxyethanol, phenylmercuric acetate, phenylmercuric nitrate, potassium sorbate, propylparaben, sodium benzoate, sodium dehydroacetate, sodium propionate, sorbic acid, thimersol, thymo, or mixtures thereof, and
COATING AGENTS: sodium carboxymethyl cellulose, cellulose acetate phthalate, ethylcellulose, gelatin, pharmaceutical glaze, hydroxypropyl cellulose, hydroxypropyl methylcellulose, hydroxypropyl methyl cellulose phthalate, methylcellulose, polyethylene glycol, polyvinyl acetate phthalate, shellac, sucrose, titanium dioxide, carnauba wax, microcrystalline wax, or mixtures thereof.

[0442] The agents either in their free form or as a salt can be combined with a polymer such as polylactic-glycoloic acid (PLGA), poly-(I)-lactic-glycolic-tartaric acid (P(I)LGT) (WO 01/12233), polyglycolic acid (U.S. Pat. No. 3,773,919), polylactic acid (U.S. Pat. No. 4,767,628), poly(M-caprolactone) and poly(alkylene oxide) (U.S. 20030068384) to create a sustained release formulation. Such formulations can be used to implants that release a peptide or another agent over a period of a few days, a few weeks or several months depending on the polymer, the particle size of the polymer, and the size of the implant (see, e.g., U.S. Pat. No. 6,620,422). Other sustained release formulations and polymers for use in are described in EP 0 467 389 A2, WO 93/24150, U.S. Pat. No. 5,612,052, WO 97/40085, WO 03/075887, WO 01/01964A2, U.S. Pat. No. 5,922,356, WO 94/155587, WO 02/074247A2, WO 98/25642, U.S. Pat. No. 5,968,895, U.S. Pat. No. 6,180,608, U.S. 20030171296, U.S. 20020176841, U.S. Pat. No. 5,672,659, U.S. Pat. No. 5,893,985, U.S. Pat. No. 5,134,122, U.S. Pat. No. 5,192,741, U.S. Pat. No. 5,192,741, U.S. Pat. No. 4,668,506, U.S. Pat. No. 4,713,244, U.S. Pat. No. 5,445,832 U.S. Pat. No. 4,931,279, U.S. Pat. No. 5,980,945, WO 02/058672, WO 9726015, WO 97/04744, and. US20020019446. In such sustained release formulations microparticles of peptide are combined with microparticles of polymer. One or more sustained release implants can be placed in the large intestine, the small intestine or both. U.S. Pat. No. 6,011,011 and WO 94/06452 describe a sustained release formulation providing either polyethylene glycols (i.e. PEG 300 and PEG 400) or triacetin. WO 03/053401 describes a formulation which may both enhance bioavailability and provide controlled release of the agent within the GI tract. Additional controlled release formulations are described in WO 02/38129, EP 326 151, U.S. Pat. No. 5,236,704, WO 02/30398, WO 98/13029; U.S. 20030064105, U.S. 20030138488A1, U.S. 20030216307A1, U.S. Pat. No. 6,667,060, WO 01/49249, WO 01/49311, WO 01/49249, WO 01/49311, and U.S. Pat. No. 5,877,224.

[0443] The agents can be administered, e.g., by intravenous injection, intramuscular injection, subcutaneous injection, intraperitoneal injection, topical, sublingual, intraarticular (in the joints), intradermal, buccal, ophthalmic (including intraocular), intranasaly (including using a cannula), via intracavernosal injection, by transurethral application or by other routes. The agents can be administered orally, e.g., as a tablet or cachet containing a predetermined amount of the active ingredient, gel, pellet, paste, syrup, bolus, electuary, slurry, capsule, powder, granules, as a solution or a suspension in an aqueous liquid or a non-aqueous liquid, as an oil-in-water liquid emulsion or a water-in-oil liquid emulsion, via a micellar formulation (see, e.g. WO 97/11682) via a liposomal formulation (see, e.g., EP 736299, WO 99/59550 and WO 97/13500), via formulations described in WO 03/094886 or in some other form. Orally administered compositions can include binders, lubricants, inert diluents, lubricating, surface active or dispersing agents, flavoring agents, and humectants. Orally administered formulations such as tablets may optionally be coated or scored and may be formulated so as to provide sustained, delayed or controlled release of the active ingredient therein. The agents can also be administered transdermally (i.e. via reservoir-type or matrix-type patches, microneedles, thermal poration, hypodermic needles, iontophoresis, electroporation, ultrasound or other forms of sonophoresis, jet injection, or a combination of any of the preceding methods (Prausnitz et al. 2004, Nature Reviews Drug Discovery 3:115-124)). The agents can be administered using high-velocity transdermal particle injection techniques using the hydrogel particle formulation described in U.S. 20020061336. Additional particle formulations are described in WO 00/45792, WO 00/53160, and WO 02/19989. An example of a transdermal formulation containing plaster and the absorption promoter dimethylisosorbide can be found in WO 89/04179. WO 96/11705 provides formulations suitable for transdermal administration. The agents can be administered in the form a suppository or by other vaginal or rectal means. The agents can be administered in a transmembrane formulation as described in WO 90/07923. The agents can be administered non-invasively via the dehydrated particles described in U.S. Pat. No. 6,485,706. The agent can be administered in an enteric-coated drug formulation as described in WO 02/49621. The agents can be administered intranassaly using the formulation described in U.S. Pat. No. 5,179,079. Formulations suitable for parenteral injection are described in WO 00/62759. The agents can be administered using the casein formulation described in U.S. 20030206939 and WO 00/06108. The agents can be administered using the particulate formulations described in U.S. 20020034536.

[0444] Compositions for oral administration can be in the form a of a “flash dosage”, i.e., a solid dosage form that is administered orally, which rapidly disperses in the mouth, and hence does not require great effort in swallowing and allows the compound to be rapidly ingested or absorbed through the oral mucosal membranes. In some embodiments, suitable rapidly dispersing dosage forms are also used in other applications, including the treatment of wounds and other bodily insults and diseased states in which release of the medicament by externally supplied moisture is not possible.

[0445] “Flash dose” forms are known in the art; see for example, effervescent dosage forms and quick release coatings of insoluble microparticles in U.S. Pat. Nos. 5,578,322 and 4,607,697; freeze dried foams and liquids in U.S. Pat. Nos. 4,642,903 and 5,631,023; melt spinning of dosage forms in U.S. Pat. Nos. 4,855,326; 5,380,326; and 5,518,730; solid, freeform fabrication in U.S. Pat. No. 6,471,992; saccharide-based carrier matrix and a liquid binder in U.S. Pat. Nos. 5,587,172; 5,616,344; 6,277,406; and 5,622,719; and other forms known to the art.

[0446] The agents, alone or in combination with other suitable components, can be administered by pulmonary route utilizing several techniques including but not limited to intratracheal instillation (delivery of solution into the lungs by syringe), intratracheal delivery of liposomes, insufflation (administration of powder formulation by syringe or any other similar device into the lungs) and aerosol inhalation. Aerosols (e.g., jet or ultrasonic nebulizers, metered-dose inhalers (MDIs), and dry-powder inhalers (DPIs)) can also be used in intranasal applications. Aerosol formulations are stable dispersions or suspensions of solid material and liquid droplets in a gaseous medium and can be placed into pressurized acceptable propellants, such as hydrofluoroalkanes (HFAs, i.e. HFA-134a and HFA-227, or a mixture thereof), dichlorodifluoromethane (or other chlorofluocarbon propellants such as a mixture of Propellants 11, 12, and/or 114), propane, nitrogen, and the like. Pulmonary formulations may include permeation enhancers such as fatty acids, and saccharides, chelating agents, enzyme inhibitors (e.g., protease inhibitors), adjuvants (e.g., glycocholate, surfactin, span 85, and nafamostat), preservatives (e.g., benzalkonium chloride or chlorobutanol), and ethanol (normally up to 5% but possibly up to 20%, by weight). Ethanol is commonly included in aerosol compositions as it can improve the function of the metering valve and in some cases also improve the stability of the dispersion. Pulmonary formulations may also include surfactants which include but are not limited to bile salts and those described in U.S. Pat. No. 6,524,557 and references therein. The surfactants described in U.S. Pat. No. 6,524,557, e.g., a C8-C16 fatty acid salt, a bile salt, a phospholipid, or alkyl saccaride are advantageous in that some of them also reportedly enhance absorption of the peptide in the formulation. Also suitable in the invention are dry powder formulations comprising a therapeutically effective amount of active compound blended with an appropriate carrier and adapted for use in connection with a dry-powder inhaler. Absorption enhancers which can be added to dry powder formulations of the present invention include those described in U.S. Pat. No. 6,632,456. WO 02/080884 describes new methods for the surface modification of powders. Aerosol formulations may include U.S. Pat. No. 5,230,884, U.S. Pat. No. 5,292,499, WO 017/8694, WO 01/78696, U.S. 2003019437, U.S. 20030165436, and WO 96/40089 (which includes vegetable oil). Sustained release formulations suitable for inhalation are described in U.S. 20010036481A1, 20030232019A1, and U.S. 20040018243A1 as well as in WO 01/13891, WO 02/067902, WO 03/072080, and WO 03/079885. Pulmonary formulations containing microparticles are described in WO 03/015750, U.S. 20030008013, and WO 00/00176. Pulmonary formulations containing stable glassy state powder are described in U.S. 20020141945 and U.S. Pat. No. 6,309,671. Other aerosol formulations are described in EP 1338272A1 WO 90/09781, U.S. Pat. No. 5,348,730, U.S. Pat. No. 6,436,367, WO 91/04011, and U.S. Pat. No. 6,294,153 and U.S. Pat. No. 6,290,987 describes a liposomal based formulation that can be administered via aerosol or other means. Powder formulations for inhalation are described in U.S. 20030053960 and WO 01/60341. The agents can be administered intranasally as described in U.S. 20010038824.

[0447] Solutions of medicament in buffered saline and similar vehicles are commonly employed to generate an aerosol in a nebulizer. Simple nebulizers operate on Bernoulli's principle and employ a stream of air or oxygen to generate the spray particles. More complex nebulizers employ ultrasound to create the spray particles. Both types are well known in the art and are described in standard textbooks of pharmacy such as Sprowls' American Pharmacy and Remington's The Science and Practice of Pharmacy. Other devices for generating aerosols employ compressed gases, usually hydrofluorocarbons and chlorofluorocarbons, which are mixed with the medicament and any necessary excipients in a pressurized container, these devices are likewise described in standard textbooks such as Sprowls and Remington.

[0448] The agents can be a free acid or base, or a pharmacologically acceptable salt thereof. Solids can be dissolved or dispersed immediately prior to administration or earlier. In some circumstances the preparations include a preservative to prevent the growth of microorganisms. The pharmaceutical forms suitable for injection can include sterile aqueous or organic solutions or dispersions which include, e.g., water, an alcohol, an organic solvent, an oil or other solvent or dispersant (e.g., glycerol, propylene glycol, polyethylene glycol, and vegetable oils). The formulations may contain antioxidants, buffers, bacteriostats, and solutes that render the formulation isotonic with the blood of the intended recipient, and aqueous and non-aqueous sterile suspensions that can include suspending agents, solubilizers, thickening agents, stabilizers, and preservatives. Pharmaceutical agents can be sterilized by filter sterilization or by other suitable means. The agent can be fused to immunoglobulins or albumin, or incorporated into a lipsome to improve half-life. The agent can also be conjugated to polyethylene glycol (PEG) chains. Methods for pegylation and additional formulations containing PEG-conjugates (i.e. PEG-based hydrogels, PEG modified liposomes) can be found in Harris and Chess, Nature Reviews Drug Discovery 2: 214-221 and the references therein. Peptides can also be modified with alkyl groups (e.g., C1-C20 straight or branched alkyl groups); fatty acid radicals; and combinations of PEG, alkyl groups and fatty acid radicals (see U.S. Pat. No. 6,309,633; Soltero et al., 2001 Innovations in Pharmaceutical Technology 106-110). The agent can be administered via a nanocochleate or cochleate delivery vehicle (BioDelivery Sciences International). The agents can be delivered transmucosally (i.e. across a mucosal surface such as the vagina, eye or nose) using formulations such as that described in U.S. Pat. No. 5,204,108. The agents can be formulated in microcapsules as described in WO 88/01165. The agent can be administered intra-orally using the formulations described in U.S. 20020055496, WO 00/47203, and U.S. Pat. No. 6,495,120. The agent can be delivered using nanoemulsion formulations described in WO 01/91728A2.

[0449] Suitable pharmaceutical compositions will generally include an amount of the active compound(s) with an acceptable pharmaceutical diluent or excipient, such as a sterile aqueous solution, to give a range of final concentrations, depending on the intended use. The techniques of preparation are generally well known in the art, as exemplified by Remington's Pharmaceutical Sciences (18th Edition, Mack Publishing Company, 1995).

[0450] The agents described herein and combination therapy agents can be packaged as a kit that includes single or multiple doses of two or more agents, each packaged or formulated individually, or single or multiple doses of two or more agents packaged or formulated in combination. Thus, one or more agents can be present in first container, and the kit can optionally include one or more agents in a second container. The container or containers are placed within a package, and the package can optionally include administration or dosage instructions. A kit can include additional components such as syringes or other means for administering the agents as well as diluents or other means for formulation.

[0451] Methods to increase chemical and/or physical stability of the agents the described herein are found in U.S. Pat. No. 6,541,606, U.S. Pat. No. 6,068,850, U.S. Pat. No. 6,124,261, U.S. Pat. No. 5,904,935, and WO 00/15224, U.S. 20030069182 (via the addition of nicotinamide), U.S. 20030175230A1, U.S. 20030175230A1, U.S. 20030175239A1, U.S. 20020045582, U.S. 20010031726, WO 02/26248, WO 03/014304, WO 98/00152A1, WO 98/00157A1, WO 90/12029, WO 00/04880, and WO 91/04743, WO 97/04796 and the references cited therein.

[0452] Methods to increase bioavailability of the agents described herein are found in U.S. Pat. No. 6,008,187, U.S. Pat. No. 5,424,289, U.S. 20030198619, WO 90/01329, WO 01/49268, WO 00/32172, and WO 02/064166. Glycyrrhizinate can also be used as an absorption enhancer (see, e.g., EP397447). WO 03/004062 discusses Ulex europaeus I (UEA1) and UEAI mimetics which may be used to target the agents of the invention to the GI tract.

[0453] The agents described herein can be fused to a modified version of the blood serum protein transferrin. U.S. 20030221201, U.S. 20040023334, U.S. 20030226155, WO 04/020454, and WO 04/019872 discuss the manufacture and use of transferrin fusion proteins. Transferrin fusion proteins may improve circulatory half life and efficacy, decrease undesirable side effects and allow reduced dosage.

### Combitherapy

### Analgesic Agents in Combitherapy

[0454] The guanylin potentiating agents described herein can be used in combination therapy with an analgesic agent, e.g., an analgesic compound or an analgesic peptide. These peptides and compounds can be administered simultaneously or sequentially with the agents described herein. They can also be optionally covalently linked or attached to an agent described herein to create therapeutic conjugates. Among the useful analgesic agents are: Ca channel blockers, 5HT receptor antagonists (for example 5HT3, 5HT4 and 5HT1 receptor antagonists), opioid receptor agonists (loperamide, fedotozine, and fentanyl), NK1 receptor antagonists, CCK receptor agonists (e.g., loxiglumide), NK1 receptor antagonists, NK3 receptor antagonists, norepinephrine-serotonin reuptake inhibitors (NSRI), vanilloid and cannabanoid receptor agonists, and sialorphin. Analgesics agents in the various classes are described in the literature.

[0455] Among the useful analgesic peptides are sialorphin-related peptides, including those comprising the amino acid sequence QHNPR (SEQ ID NO: 11), including: VQHNPR (SEQ ID NO: 12); VRQHNPR (SEQ ID NO: 13); VRGQHNPR (SEQ ID NO: 14); VRGPQHNPR (SEQ ID NO: 15); VRGPRQHNPR (SEQ ID NO: 16); VRGPRRQHNPR (SEQ ID NO: 17); and RQHNPR (SEQ ID NO: 18). Sialorphin-related peptides bind to neprilysin and inhibit neprilysin-mediated breakdown of substance P and Met-enkephalin. Thus, compounds or peptides that are inhibitors of neprilysin are useful analgesic agents which can be administered with the peptides of the invention in a co-therapy or linked to the peptides of the invention, e.g., by a covalent bond. Sialophin and related peptides are described in U.S. Pat. No. 6,589,750; U.S. 20030078200 A1; and WO 02/051435 A2.

[0456] Opioid receptor antagonists and agonists can be administered with the guanylin potentiating agents described herein in co-therapy or linked to the agent of the invention, e.g., by a covalent bond. For example, opioid receptor antagonists such as naloxone, naltrexone, methyl nalozone, nalmefene, cypridime, beta funaltrexamine, naloxonazine, naltrindole, and nor-binaltorphimine are thought to be useful in the treatment of IBS. It can be useful to formulate opioid antagonists of this type is a delayed and sustained release formulation such that initial release of the antagonist is in the mid to distal small intestine and/or ascending colon. Such antagonists are described in WO 01/32180 A2. Enkephalin pentapeptide (HOE825; Tyr-D-Lys-Gly-Phe-L-homoserine) is an agonist of the mu and delta opioid receptors and is thought to be useful for increasing intestinal motility (Eur. J. Pharm. 219:445, 1992), and this peptide can be used in conjunction with the peptides of the invention. Also useful is trimebutine which is thought to bind to mu/delta/kappa opioid receptors and activate release of motilin and modulate the release of gastrin, vasoactive intestinal peptide, gastrin and glucagons. Kappa opioid receptor agonists such as fedotozine, asimadoline, and ketocyclazocine, and compounds described in WO 03/097051 A2 can be used with or linked to the peptides of the invention. In addition, mu opioid receptor agonists such as morphine, diphenyloxylate, frakefamide (H-Tyr-D-Ala-Phe(F)-Phe-NH2; WO 01/019849 A1) and loperamide can be used.

[0457] Tyr-Arg (kyotorphin) is a dipeptide that acts by stimulating the release of met-enkephalins to elicit an analgesic effect (J. Biol. Chem. 262:8165, 1987). Kyotorphin can be used with or linked to the guanylin potentiating agents described herein.

[0458] Chromogranin-derived peptide (CgA 47-66; see, e.g., Ghia et al. 2004 Regulatory Peptides 119:199) can be used with or linked to the guanylin potentiating agents described herein.

[0459] CCK receptor agonists such as caerulein from amphibians and other species are useful analgesic agents that can be used with or linked to the guanylin potentiating agents described herein.

[0460] Conotoxin peptides represent a large class of analgesic peptides that act at voltage gated Ca channels, NMDA receptors or nicotinic receptors. These peptides can be used with or linked to the guanylin potentiating agents described herein.

[0461] Peptide analogs of thymulin (FR Application 2830451) can have analgesic activity and can be used with or linked to the guanylin potentiating agents described herein.

[0462] CCK (CCKa or CCKb) receptor antagonists, including loxiglumide and dexloxiglumide (the R-isomer of loxiglumide) (WO 88/05774) can have analgesic activity and can be used with or linked to the guanylin potentiating agents described herein.

[0463] Other useful analgesic agents include 5-HT4 agonists such as tegaserod (ZelnormÒ), mosapride, metoclopramide, zacopride, cisapride, renzapride, benzimidazolone derivatives such as BIMU 1 and BIMU 8, and lirexapride. Such agonists are described in: EP1321142 A1, WO 03/053432A1, EP 505322 A1, EP 505322 B1, U.S. Pat. No. 5,510,353, EP 507672 A1, EP 507672 B1, and U.S. Pat. No. 5,273,983.

[0464] Calcium channel blockers such as ziconotide and related compounds described in, for example, EP625162B1, U.S. Pat. No. 5,364,842, U.S. Pat. No. 5,587,454, U.S. Pat. No. 5,824,645, U.S. Pat. No. 5,859,186, U.S. Pat. No. 5,994,305, U.S. Pat. No. 6,087,091, U.S. Pat. No. 6,136,786, WO 93/13128 A1, EP 1336409 A1, EP 835126 A1, EP 835126 B1, U.S. Pat. No. 5,795,864, U.S. Pat. No. 5,891,849, U.S. Pat. No. 6,054,429, WO 97/01351 A1, can be used with or linked to a guanylin potentiating agent described herein.

[0465] Various antagonists of the NK-1, NK-2, and NK-3 receptors (for a review see Giardina et al. 2003 Drugs 6:758) can be can be used with or linked to the guanylin potentiating agents described herein.

[0466] NK1 receptor antagonists such as: aprepitant (Merck & Co Inc), vofopitant, ezlopitant (Pfizer, Inc.), R-673 (Hoffmann-La Roche Ltd), SR-48968 (Sanofi Synthelabo), CP-122,721 (Pfizer, Inc.), GW679769 (Glaxo Smith Kline), TAK-637 (Takeda/Abbot), SR-14033, and related compounds described in, for example, EP 873753 A1, US 20010006972 A1, US 20030109417 A1, WO 01/52844 A1, can be used with or linked to the guanylin potentiating agents described herein.

[0467] NK-2 receptor antagonists such as nepadutant (Menarini Ricerche SpA), saredutant (Sanofi-Synthelabo), GW597599 (Glaxo Smith Kline), SR-144190 (Sanofi-Synthelabo) and UK-290795 (Pfizer Inc) can be used with or linked to the prodrugs of chymotrypsin inhibitors described herein.

[0468] NK3 receptor antagonists such as osanetant (SR-142801; Sanofi-Synthelabo), SSR-241586, talnetant and related compounds described in, for example, WO 02/094187 A2, EP 876347 A1, WO 97/21680 A1, U.S. Pat. No. 6,277,862, WO 98/11090, WO 95/28418, WO 97/19927, and Boden et al. (J Med Chem. 39:1664-75, 1996) can be used with or linked to the guanylin potentiating agents described herein.

[0469] Norepinephrine-serotonin reuptake inhibitors (NSRI) such as milnacipran and related compounds described in WO 03/077897 A1 can be used with or linked to the guanylin potentiating agents described herein.

[0470] Vanilloid receptor antagonists such as arvanil and related compounds described in WO 01/64212 A1 can be used with or linked to the guanylin potentiating agents described herein.

[0471] The analgesic peptides and compounds can be administered with guanylin potentiating agents (simultaneously or sequentially). The analgesic agents can also be covalently linked to the guanylin potentiating agents described herein to create therapeutic conjugates. Where the analgesic is a peptide and is covalently linked to a guanylin potentiating agent the resulting peptide may also include at least one trypsin cleavage site. When present within the peptide, the analgesic peptide may be preceded by (if it is at the carboxy terminus) or followed by (if it is at the amino terminus) a trypsin cleavage site that allows release of the analgesic peptide.

[0472] In addition to sialorphin-related peptides, analgesic peptides include: AspPhe, endomorphin-1, endomorphin-2, nocistatin, dalargin, lupron, ziconotide, and substance P.

### Diabetes, Obesity and Other Disorders.

[0473] Pharmaceutical compositions comprising at least two of: 1) an agent that stimulates the production of cAMP (e.g., glucagon-like peptide 1 (GLP-1)); 2) an agent that inhibits the degradation of a cyclic nucleotide (e.g., a phosphodiesterase inhibitor); and 3) a guanlyin potentiating agent can be useful for treating diabetes and obesity. Such compositions may also be useful for treating secondary hyperglycemias in connection with pancreatic diseases (chronic pancreatitis, pancreasectomy, hemochromatosis) or endocrine diseases (acromegaly, Cushing's syndrome, pheochromocytoma or hyperthyreosis), drug-induced hyperglycemias (benzothiadiazine saluretics, diazoxide or glucocorticoids), pathologic glucose tolerance, hyperglycemias, dyslipoproteinemias, adiposity, hyperlipoproteinemias and/or hypotensions. In certain embodiments, the compositions further comprise guanylin or a biologically active variant or fragment thereof. In certain embodiments, the methods further comprise administering guanylin or a biologically active variant or fragment thereof.

[0474] The phosphodiesterase inhibitor can be specific for a particular phosphodiesterase (e.g., Group III or Group IV) or a non-specific phosphodiesterase inhibitor, such as papaverine, theophylline, enprofyllines and/or IBMX. Specific phosphodiesterase inhibitors which inhibit group III phosphodiesterases (cGMP-inhibited phosphodiesterases), including indolidane (LY195115), cilostamide (OPC 3689), lixazinone (RS 82856), Y-590, imazodane (CI914), SKF 94120, quazinone, ICI 153,110, cilostazole, bemorandane (RWJ 22867), siguazodane (SK&F 94-836), adibendane (BM 14,478), milrinone (WIN 47203), enoximone (MDL 17043), pimobendane (UD-CG 115), MCI-154, saterinone (BDF 8634), sulmazole (ARL 115), UD-CG 212, motapizone, piroximone, and ICI 118233 can be useful. In addition, phosphodiesterase inhibitors which inhibit group IV phosphodiesterases (cAMP-specific phosphodiesterases), such as rolipram ZK 62711; pyrrolidone), imidazolidinone (RO 20-1724), etazolate (SQ 65442), denbufylline (BRL 30892), ICI63197, and RP73401 can be used.

### Other Agents for Use in Combitherapy

[0475] Pharmaceutical compositions comprising a guanylin potentiating agent and a second therapeutic agent are useful, The second therapeutic agent can be administered to treat any condition for which it is useful, including conditions that are not considered to be the primary indication for treatment with the second therapeutic agent.

[0476] Examples of additional therapeutic agents to treat gastrointestinal and other disorders include:

agents to treat constipation (e.g., a chloride channel activator such as the bicylic fatty acid, Lubiprostone (formerly known as SPI-0211; Sucampo Pharmaceuticals, Inc.; Bethesda, Md.), a laxative (eg. a bulk-forming laxative (e.g. nonstarch polysaccharides, Colonel Tablet (polycarbophil calcium), Plantago Ovata®, Equalactin® (Calcium Polycarbophil)), fiber (e.g. FIBERCON® (Calcium Polycarbophil), an osmotic laxative, a stimulant laxative (such as diphenylmethanes (e.g. bisacodyl), anthraquinones (e.g. cascara, senna), and surfactant laxatives (e.g. castor oil, docusates), an emollient/lubricating agent (such as mineral oil, glycerine, and docusates), MiraLax (Braintree Laboratories, Braintree Mass.), dexloxiglumide (Forest Laboratories, also known as CR 2017 Rottapharm (Rotta Research Laboratorium SpA)), saline laxatives, enemas, suppositories, and CR 3700 (Rottapharm (Rotta Research Laboratorium SpA);
acid reducing agents such as proton pump inhibitors (e.g., omeprazole (Prilosec®), esomeprazole (Nexium®), lansoprazole (Prevacid®), pantoprazole (Protonix®) and rabeprazole (Aciphex®)) and Histamine H2-receptor antagonist (also known as H2 receptor blockers including cimetidine, ranitidine, famotidine and nizatidine);
prokinetic agents including itopride, octreotide, bethanechol, metoclopramide (Reglan®), domperidone (Motilium®), erythromycin (and derivatives thereof) or cisapride (Propulsid®);

[0477] pro-motility agents such as the vasostatin-derived peptide, chromogranin A (4-16) (see, e.g., Ghia et al. 2004 Regulatory Peptides 121:31) or motilin agonists (e.g., GM-611 or mitemcinal fumarate) or nociceptin/Orphanin FQ receptor modulators (US20050169917);

complete or partial 5HT (e.g. 5HT1, 5HT2, 5HT3, 5HT4) receptor agonists or antagonists (including 5HT1A antagonists (e.g. AGI-001 (AGI therapeutics), 5HT2B antagonists (e.g. PGN1091 and PGN1164 (Pharmagene Laboratories Limited), and 5HT4 receptor agonists (such as tegaserod (ZELNORM®), prucalopride, mosapride, metoclopramide, zacopride, cisapride, renzapride, benzimidazolone derivatives such as BIMU 1 and BIMU 8, and lirexapride). Such agonists/modulatos are described in: EP1321142 A1, WO 03/053432A1, EP 505322 A1, EP 505322 B1, U.S. Pat. No. 5,510,353, EP 507672 A1, EP 507672 B1, U.S. Pat. No. 5,273,983, and U.S. Pat. No. 6,951,867); 5HT3 receptor agonists such as MKC-733; and 5HT3 receptor antagonists such as DDP-225 (MCI-225; Dynogen Pharmaceuticals, Inc.), cilansetron (Calmactin®), alosetron (Lotronex®), Ondansetron HCl (Zofran®), Dolasetron (ANZEMET®), palonosetron (Aloxi®), Granisetron (Kytril®), YM060(ramosetron; Astellas Pharma Inc.; ramosetron may be given as a daily dose of 0.002 to 0.02 mg as described in EP01588707) and ATI-7000 (Aryx Therapeutics, Santa Clara Calif.);
muscarinic receptor agonists;
anti-inflammatory agents;
antispasmodics including but not limited to anticholinergic drugs (like dicyclomine (e.g. Colimex®, Formulex®, Lomine®, Protylol®, Viscerol®, Spasmoban®, Bentyl®, Bentylol®, hyoscyamine (e.g. IB-Stat®, Nulev®, Levsin®, Levbid®, Levsinex Timecaps®, Levsin/SL®, Anaspaz®, A-Spas S/L®, Cystospaz®, Cystospaz-M®, Donnamar®, Colidrops Liquid Pediatric®, Gastrosed®, Hyco Elixir®, Hyosol®, Hyospaz®, Hyosyne®, Losamine®, Medispaz®, Neosol®, Spacol®, Spasdel®, Symax®, Symax SL®), Donnatal (e.g. Donnatal Extentabs®), clidinium (e.g. Quarzan, in combination with Librium=Librax), methantheline (e.g. Banthine), Mepenzolate (e.g. Cantil), homatropine (e.g. hycodan, Homapin), Propantheline bromide (e.g. Pro-Banthine), Glycopyrrolate (e.g. Robinul®, Robinul Forte®), scopolamine (e.g. Transderm-Scop®, Transderm-V®), hyosine-N-butylbromide (e.g. Buscopan®), Pirenzepine (e.g. Gastrozepin®) Propantheline Bromide (e.g. Propanthel®), dicycloverine (e.g. Merbentyl®), glycopyrronium bromide (e.g. Glycopyrrolate®), hyoscine hydrobromide, hyoscine methobromide, methanthelinium, and octatropine); peppermint oil; and direct smooth muscle relaxants like cimetropium bromide, mebeverine (DUSPATAL®, DUSPATALIN®, COLOFAC MR®, COLOTAL®), otilonium bromide (octilonium), pinaverium (e.g. Dicetel® (pinaverium bromide; Solvay S.A.)), Spasfon® (hydrated phloroglucinol and trimethylphloroglucinol) and trimebutine (including trimebutine maleate (Modulon®);
antidepressants, including but not limited to those listed herein, as well as tricyclic antidepressants like amitriptyline (Elavil®), desipramine (Norpramin®), imipramine (Tofranil®), amoxapine (Asendin®), nortriptyline; the selective serotonin reuptake inhibitors (SSRI's) like paroxetine (Paxil®), fluoxetine (Prozac®), sertraline (Zoloft®), and citralopram (Celexa®); and others like doxepin (Sinequan®) and trazodone (Desyrel®);
centrally-acting analgesic agents such as opioid receptor agonists, opioid receptor antagonists (e.g., naltrexone);
agents for the treatment of Inflammatory bowel disease;
agents for the treatment of Crohn's disease and/or ulcerative colitis (e.g., alequel (Enzo Biochem, Inc.; Farmingsale, N.Y.), the anti-inflammatory peptide RDP58 (Genzyme, Inc.; Cambridge, Mass.), and TRAFICET-EN™ (ChemoCentryx, Inc.; San Carlos, Calif.);
agents that treat gastrointestinal or visceral pain;
agents that increase cGMP levels (as described in US20040121994) like adrenergic receptor antagonists, dopamine receptor agonists and PDE (phosphodiesterase) inhibitors including but not limited to those disclosed herein;
purgatives that draw fluids to the intestine (e.g., VISICOL®, a combination of sodium phosphate monobasic monohydrate and sodium phosphate dibasic anhydrate);
Corticotropin Releasing Factor (CRF) receptor antagonists (including NBI-34041 (Neurocrine Biosciences, San Diego, Calif.), CRH9-41, astressin, R121919 (Janssen Pharmaceutica), CP154,526, NBI-27914, Antalarmin, DMP696 (Bristol-Myers Squibb) CP-316,311 (Pfizer, Inc.), SB723620 (GSK), GW876008 (Neurocrine/Glaxo Smith Kline), ONO-2333Ms (Ono Pharmaceuticals), TS-041 (Janssen), AAG561 (Novartis) and those disclosed in U.S. Pat. No. 5,063,245, U.S. Pat. No. 5,861,398, US20040224964, US20040198726, US20040176400, US20040171607, US20040110815, US20040006066, and US20050209253);
glucagon-like peptides (glp-1) and analogues thereof (including exendin-4 and GTP-010 (Gastrotech Pharma A)) and inhibitors of DPP-IV (DPP-IV mediates the inactivation of glp-1);
tofisopam, enantiomerically-pure R-tofisopam, and pharmaceutically-acceptable salts thereof (US 20040229867);
tricyclic anti-depressants of the dibenzothiazepine type including but not limited to Dextofisopam® (Vela Pharmaceuticals), tianeptine (Stablon®) and other agents described in U.S. Pat. No. 6,683,072;
(E)-4 (1,3bis(cyclohexylmethyl)-1,2,34,-tetrahydro-2,6-diono-9H-purin-8-yl)cinnamic acid nonaethylene glycol methyl ether ester and related compounds described in WO 02/067942;
the probiotic PROBACTRIX® (The BioBalance Corporation; New York, N.Y.) which contains microorganisms useful in the treatment of gastrointestinal disorders;
antidiarrheal drugs including but not limited to loperamide (Imodium, Pepto Diarrhea), diphenoxylate with atropine (Lomotil, Lomocot), cholestyramine (Questran, Cholybar), atropine (Co-Phenotrope, Diarsed, Diphenoxylate, Lofene, Logen, Lonox, Vi-Atro, atropine sulfate injection) and Xifaxan® (rifaximin; Salix Pharmaceuticals Ltd), TZP-201 (Tranzyme Pharma Inc.), the neuronal acetylcholine receptor (nAChR) blocker AGI-004 (AGI therapeutics), and bismuth subsalicylate (Pepto-bismol);
anxiolytic drugs including but not limited to Ativan (lorazepam), alprazolam (Xanax®), chlordiazepoxide/clidinium (Librium®, Librax®), clonazepam (Klonopin®), clorazepate (Tranxene®), diazepam (Valium®), estazolam (ProSom®), flurazepam (Dalmane®), oxazepam (Serax®), prazepam (Centrax®), temazepam (Restoril®), triazolam (Halcion®;
Bedelix® (Montmorillonite beidellitic; Ipsen Ltd), Solvay SLV332 (ArQule Inc), YKP (SK Pharma), Asimadoline (Tioga Pharmaceuticals/Merck), AGI-003 (AGI Therapeutics);
the serotonin modulator AZD7371 (AstraZeneca Plc);
M3 muscarinic receptor antagonists such as darifenacin (Enablex; Novartis AG and zamifenacin (Pfizer);
herbal and natural therapies including but not limited to acidophilus, chamomile tea, evening primrose oil, fennel seeds, wormwood, comfrey, and compounds of Bao-Ji-Wan (magnolol, honokiol, imperatorin, and isoimperatorin) as in U.S. Pat. No. 6,923,992; and
compositions comprising lysine and an anti-stress agent for the treatment of irritable bowel syndrome as described in EP01550443.

[0478] The guanylin potentiating agents described herein can be used in combination therapy with insulin and related compounds including primate, rodent, or rabbit insulin including biologically active variants thereof including allelic variants, more preferably human insulin available in recombinant form. Sources of human insulin include pharmaceutically acceptable and sterile formulations such as those available from Eli Lilly (Indianapolis, Ind. 46285) as Humulin™ (human insulin rDNA origin). See the THE PHYSICIAN'S DESK REFERENCE, 55.sup.th Ed. (2001) Medical Economics, Thomson Healthcare (disclosing other suitable human insulins). The guanylin potentiating agents described herein can also be used in combination therapy with agents that can boost insulin effects or levels of a subject upon administration, e.g. glipizide and/or rosiglitazone. The guanylin potentiating agents herein can be used in combitherapy with SYMLIN® (pramlintide acetate) and Exenatide® (synthetic exendin-4; a 39 aa peptide).

[0479] The guanylin potentiating agents described herein can also be used in combination therapy with agents (e.g., Entereg™ (alvimopan; formerly called adolor/ADL 8-2698), conivaptan and related agents describe in U.S. Pat. No. 6,645,959) for the treatment of postoperative ileus.

[0480] The guanylin potentiating agents described herein can be used in combination therapy with an anti-hypertensive agent including but not limited to:

(1) diuretics, such as thiazides, including chlorthalidone, chlorthiazide, dichlorophenamide, hydroflumethiazide, indapamide, polythiazide, and hydrochlorothiazide; loop diuretics, such as bumetanide, ethacrynic acid, furosemide, and torsemide; potassium sparing agents, such as amiloride, and triamterene; and aldosterone antagonists, such as spironolactone, epirenone, and the like;
(2) beta-adrenergic blockers such as acebutolol, atenolol, betaxolol, bevantolol, bisoprolol, bopindolol, carteolol, carvedilol, celiprolol, esmolol, indenolol, metaprolol, nadolol, nebivolol, penbutolol, pindolol, propanolol, sotalol, tertatolol, tilisolol, and timolol, and the like;
(3) calcium channel blockers such as amlodipine, aranidipine, azelnidipine, barnidipine, benidipine, bepridil, cinaldipine, clevidipine, diltiazem, efonidipine, felodipine, gallopamil, isradipine, lacidipine, lemildipine, lercanidipine, nicardipine, nifedipine, nilvadipine, nimodepine, nisoldipine, nitrendipine, manidipine, pranidipine, and verapamil, and the like;
(4) angiotensin converting enzyme (ACE) inhibitors such as benazepril; captopril; ceranapril; cilazapril; delapril; enalapril; enalopril; fosinopril; imidapril; lisinopril; losinopril; moexipril; quinapril; quinaprilat; ramipril; perindopril; perindropril; quanipril; spirapril; tenocapril; trandolapril, and zofenopril, and the like;
(5) neutral endopeptidase inhibitors such as omapatrilat, cadoxatril and ecadotril, fosidotril, sampatrilat, AVE7688, ER4030, and the like;
(6) endothelin antagonists such as tezosentan, A308165, and YM62899, and the like;
(7) vasodilators such as hydralazine, clonidine, minoxidil, and nicotinyl alcohol, and the like;
(8) angiotensin II receptor antagonists such as aprosartan, candesartan, eprosartan, irbesartan, losartan, olmesartan, pratosartan, tasosartan, telmisartan, valsartan, and EXP-3137, FT6828K, and RNH6270, and the like;
(9) α/β adrenergic blockers such as nipradilol, arotinolol and amosulalol, and the like;
(10) alpha 1 blockers, such as terazosin, urapidil, prazosin, tamsulosin, bunazosin, trimazosin, doxazosin, naftopidil, indoramin, WHP 164, and XEN010, and the like;
(11) alpha 2 agonists such as lofexidine, tiamenidine, moxonidine, rilmenidine and guanobenz, and the like;
(12) aldosterone inhibitors, and the like; and
(13) angiopoietin-2-binding agents such as those disclosed in WO03/030833.

[0481] Specific anti-hypertensive agents that can be used in combination with guanylin potentiating agents described herein include, but not limited to:

diuretics, such as thiazides (e.g., chlorthalidone, cyclothiazide (CAS RN 2259-96-3), chlorothiazide (CAS RN 72956-09-3, which may be prepared as disclosed in US2809194), dichlorophenamide, hydroflumethiazide, indapamide, polythiazide, bendroflumethazide, methyclothazide, polythiazide, trichlormethazide, chlorthalidone, indapamide, metolazone, quinethazone, althiazide (CAS RN 5588-16-9, which may be prepared as disclosed in British Patent No. 902,658), benzthiazide (CAS RN 91-33-8, which may be prepared as disclosed in U.S. Pat. No. 3,108,097), buthiazide (which may be prepared as disclosed in British Patent Nos. 861,367), and hydrochlorothiazide), loop diuretics (e.g. bumetanide, ethacrynic acid, furosemide, and torasemide), potassium sparing agents (e.g. amiloride, and triamterene (CAS Number 396-01-0)), and aldosterone antagonists (e.g. spironolactone (CAS Number 52-01-7), epirenone, and the like); β-adrenergic blockers such as Amiodarone (Cordarone, Pacerone), bunolol hydrochloride (CAS RN 31969-05-8, Parke-Davis), acebutolol (±N-[3-Acetyl-4-[2-hydroxy-3-[(1 methylethyl)amino]propoxy]phenyl]-butanamide, or (±)-3′-Acetyl-4′-[2-hydroxy-3-(isopropylamino) propoxy]butyranilide), acebutolol hydrochloride (e.g. Sectral®, Wyeth-Ayerst), alprenolol hydrochloride (CAS RN 13707-88-5 see Netherlands Patent Application No. 6,605,692), atenolol (e.g. Tenormin®, AstraZeneca), carteolol hydrochloride (e.g. Cartrol® Filmtab®, Abbott), Celiprolol hydrochloride (CAS RN 57470-78-7, also see in U.S. Pat. No. 4,034,009), cetamolol hydrochloride (CAS RN 77590-95-5, see also U.S. Pat. No. 4,059,622), labetalol hydrochloride (e.g. Normodyne®, Schering), esmolol hydrochloride (e.g. Brevibloc®, Baxter), levobetaxolol hydrochloride (e.g. Betaxon™ Ophthalmic Suspension, Alcon), levobunolol hydrochloride (e.g. Betagan® Liquifilm® with C CAP® Compliance Cap, Allergan), nadolol (e.g. Nadolol, Mylan), practolol (CAS RN 6673-35-4, see also U.S. Pat. No. 3,408,387), propranolol hydrochloride (CAS RN 318-98-9), sotalol hydrochloride (e.g. Betapace AF™, Berlex), timolol (2-Propanol,1-[(1,1-dimethylethyl)amino]-3-[[4-4(4-morpholinyl)-1,2,5-thiadiazol-3-yl]oxy]-, hemihydrate, (S)—, CAS RN 91524-16-2), timolol maleate (S)-1-[(1,1-dimethylethyl) amino]-3-[[4-(4-morpholinyl)-1,2,5-thiadiazol-3-yl]oxy]-2-propanol (Z)-2-butenedioate (1:1) salt, CAS RN 26921-17-5), bisoprolol (2-Propanol, 1-[4-[[2-(1-methylethoxy)ethoxy]-methyl]phenoxyl]-3-[(1-meth-ylethyl)amino]-, (+), CAS RN 66722-44-9), bisoprolol fumarate (such as (±)-1-[4-[[2-(1-Methylethoxy) ethoxy]methyl]phenoxy]-3-[(1-methylethyl)amino]-2-propanol (E)-2-butenedioate (2:1) (salt), e.g., Zebeta™, Lederle Consumer), nebivalol (2H-1-Benzopyran-2-methanol, αα′-[iminobis(methylene)]bis[6-fluoro-3,4-dihydro-, CAS RN 99200-09-6 see also U.S. Pat. No. 4,654,362), cicloprolol hydrochloride, such 2-Propanol, 1-[4-[2-(cyclopropylmethoxy)ethoxy]phenoxy]-3-[1-methylethyl)amino]-, hydrochloride, A.A.S. RN 63686-79-3), dexpropranolol hydrochloride (2-Propanol,1-[1-methylethy)-amino]-3-(1-naphthalenyloxy)-hydrochloride (CAS RN 13071-11-9), diacetolol hydrochloride (Acetamide, N-[3-acetyl-4-[2-hydroxy-3-[(1-methyl-ethyl)amino]propoxy][phenyl]-, monohydrochloride CAS RN 69796-04-9), dilevalol hydrochloride (Benzamide, 2-hydroxy-5-[1-hydroxy-2-[1-methyl-3-phenylpropyl)amino]ethyl]-, monohydrochloride, CAS RN 75659-08-4), exaprolol hydrochloride (2-Propanol, 1-(2-cyclohexylphenoxy)-3-[(1-methylethyl)amino]-, hydrochloride CAS RN 59333-90-3), flestolol sulfate (Benzoic acid, 2-fluoro-,3-[[2-[aminocarbonyl)amino]-dimethylethyl]amino]-2-hydroxypropyl ester, (±)-sulfate (1:1) (salt), CAS RN 88844-73-9; metalol hydrochloride (Methanesulfonamide, N-[4-[1-hydroxy-2-(methylamino)propyl]phenyl]-, monohydrochloride CAS RN 7701-65-7), metoprolol 2-Propanol, 1-[4-(2-methoxyethyl)phenoxy]-3-[1-methylethyl)amino]-; CAS RN 37350-58-6), metoprolol tartrate (such as 2-Propanol, 1-[4-(2-methoxyethyl)phenoxy]-3-[(1-methylethyl)amino]-, e.g., Lopressor®, Novartis), pamatolol sulfate (Carbamic acid, [2-[4-[2-hydroxy-3-[(1-methylethyl)amino]propoxyl]phenyl]-ethyl]-, methyl ester, (±) sulfate (salt) (2:1), CAS RN 59954-01-7), penbutolol sulfate (2-Propanol, 1-(2-cyclopentylphenoxy)-3-[1,1-dimethyle-thyl)amino]1, (S)—, sulfate (2:1) (salt), CAS RN 38363-32-5), practolol (Acetamide, N-[4-[2-hydroxy-3-[(1-methylethyl)amino]-propoxy]phenyl]-, CAS RN 6673-35-4;) tiprenolol hydrochloride (Propanol, 1-[(1-methylethyl)amino]-3-[2-(methylthio)-phenoxy]-, hydrochloride, (±), CAS RN 39832-43-4), tolamolol (Benzamide, 4-[2-[[2-hydroxy-3-(2-methylphenoxy)-propyl]amino]ethoxyl]-, CAS RN 38103-61-6), bopindolol, indenolol, pindolol, propanolol, tertatolol, and tilisolol, and the like; calcium channel blockers such as besylate salt of amlodipine (such as 3-ethyl-5-methyl-2-(2-aminoethoxymethyl)-4-(2-chlorophenyl)-1,4-dihydro-6-methyl-3,5-pyridinedicarboxylate benzenesulphonate, e.g., Norvasc®, Pfizer), clentiazem maleate (1,5-Benzothiazepin-4(5H)-one, 3-(acetyloxy)-8-chloro-5-[2-(dimethylamino)ethyl]-2,3-dihydro-2-(4-methoxyphenyl)-(2S-cis)-, (Z)-2-butenedioate (1:1), see also U.S. Pat. No. 4,567,195), isradipine (3,5-Pyridinedicarboxylic acid, 4-(4-benzofurazanyl)-1,4-dihydro-2,6-dimethyl-, methyl 1-methylethyl ester, (±)-4(4-benzofurazanyl)-1,4-dihydro-2,6-dimethyl-3,5-pyridinedicarboxylate, see also U.S. Pat. No. 4,466,972); nimodipine (such as is isopropyl (2-methoxyethyl) 1,4-dihydro-2,6-dimethyl-4-(3-nitrophenyl)-3,5-pyridine-dicarboxylate, e.g. Nimotop®, Bayer), felodipine (such as ethyl methyl 4-(2,3-dichlorophenyl)-1,4-dihydro-2,6-dimethyl-3,5-pyridinedicarboxylate-, e.g. Plendil® Extended-Release, AstraZeneca LP), nilvadipine (3,5-Pyridinedicarboxylic acid, 2-cyano-1,4-dihydro-6-methyl-4-(3-nitrophenyl)-,3-methyl 5-(1-methylethyl) ester, also see U.S. Pat. No. 3,799,934), nifedipine (such as 3,5-pyridinedicarboxylic acid, 1,4-dihydro-2,6-dimethyl-4-(2-nitrophenyl)-, dimethyl ester, e.g., Procardia XL® Extended Release Tablets, Pfizer), diltiazem hydrochloride (such as 1,5-Benzothiazepin-4(5H)-one, 3-(acetyloxy)-5[2-(dimethylamino)ethyl]-2,-3-dihydro-2(4-methoxyphenyl)-, monohydrochloride, (+)-cis., e.g., Tiazac®, Forest), verapamil hydrochloride (such as benzeneacetronitrile, (alpha)-[[3-[[2-(3,4-dimethoxyphenyl)ethyl]methylamino]propyl]-3,4-dimethoxy-(alpha)-(1-methylethyl)hydrochloride, e.g., Isoptin® SR, Knoll Labs), teludipine hydrochloride (3,5-Pyridinedicarboxylic acid, 2-[(dimethylamino)methyl]4-[2-[(1E)-3-(1,1-dimethylethoxy)-3-oxo-1-propenyl]phenyl]-1,4-dihydro-6-methyl-, diethyl ester, monohydrochloride) CAS RN 108700-03-4), belfosdil (Phosphonic acid, [2-(2-phenoxyethyl)-1,3-propane-diyl]bis-, tetrabutyl ester CAS RN 103486-79-9), fostedil (Phosphonic acid, [[4-(2-benzothiazolyl)phenyl]methyl]-, diethyl ester CAS RN 75889-62-2), aranidipine, azelnidipine, barnidipine, benidipine, bepridil, cinaldipine, clevidipine, efonidipine, gallopamil, lacidipine, lemildipine, lercanidipine, monatepil maleate (1-piperazinebutanamide, N-(6,11-dihydrodibenzo(b,e)thiepin-11-yl)₄-(4-fluorophenyl)-, (±)-, (Z)-2-butenedioate (1:1)(±)—N-(6,11-Dihydrodibenzo(b,e)thiep-in-11-yl)-4-(p-fluorophenyl)-1-piperazinebutyramide maleate (1:1) CAS RN 132046-06-1), nicardipine, nisoldipine, nitrendipine, manidipine, pranidipine, and the like;
T-channel calcium antagonists such as mibefradil; angiotensin converting enzyme (ACE) inhibitors such as benazepril, benazepril hydrochloride (such as 3-[[1-(ethoxycarbonyl)-3-phenyl-(1 S)-propyl]amino]-2,3,4,5-tetrahydro-2-oxo-1H-1-(3S)-benzazepine-1-acetic acid monohydrochloride, e.g., Lotrel®, Novartis), captopril (such as i-[(2S)-3-mercapto-2-methylpropionyl]-L-proline, e.g., Captopril, Mylan, CAS RN 62571-86-2 and others disclosed in U.S. Pat. No. 4,046,889), ceranapril (and others disclosed in U.S. Pat. No. 4,452,790), cetapril (alacepril, Dainippon disclosed in Eur. Therap. Res. 39:671 (1986); 40:543 (1986)), cilazapril (Hoffman-LaRoche) disclosed in J. Cardiovasc. Pharmacol. 9:39 (1987), indalapril (delapril hydrochloride (2H-1,2,4-Benzothiadiazine-7-sulfonamide, 3-bicyclo[2.2.1]hept-5-en-2-yl-6-chloro-3,4-dihydro-, 1,1-dioxide CAS RN 2259-96-3); disclosed in U.S. Pat. No. 4,385,051), enalapril (and others disclosed in U.S. Pat. No. 4,374,829), enalopril, enaloprilat, fosinopril, ((such as L-proline, 4-cyclohexyl-1-[[[2-methyl-1-(1-oxopropoxy) propoxy](4-phenylbutyl) phosphinyl]acetyl]-, sodium salt, trans-, e.g., Monopril, Bristol-Myers Squibb and others disclosed in U.S. Pat. No. 4,168,267), fosinopril sodium (L-Proline, 4-cyclohexyl-1-[[(R)-[(1S)-2-methyl-1-(1-ox-opropoxy)propox), imidapril, indolapril (Schering, disclosed in J. Cardiovasc. Pharmacol. 5:643, 655 (1983)), lisinopril (Merck), losinopril, moexipril, moexipril hydrochloride (3-Isoquinolinecarboxylic acid, 2-[(2S)-2-[[(1S)-1-(ethoxycarbonyl)-3-phenylpropyl]amino]-1-oxopropyl]-1,-2,3,4-tetrahydro-6,7-dimethoxy-, monohydrochloride, (3S)-CAS RN 82586-52-5), quinapril, quinaprilat, ramipril (Hoechsst) disclosed in EP 79022 and Curr. Ther. Res. 40:74 (1986), perindopril erbumine (such as 2S,3aS,7aS-1-[(S)—N—[(S)-1-Carboxybutyl]alanyl]hexahydro-2-indolinecarboxylic acid, 1-ethyl ester, compound with tert-butylamine (1:1), e.g., Aceon®, Solvay), perindopril (Servier, disclosed in Eur. J. clin. Pharmacol. 31:519 (1987)), quanipril (disclosed in U.S. Pat. No. 4,344,949), spirapril (Schering, disclosed in Acta. Pharmacol. Toxicol. 59 (Supp. 5):173 (1986)), tenocapril, trandolapril, zofenopril (and others disclosed in U.S. Pat. No. 4,316,906), rentiapril (fentiapril, disclosed in Clin. Exp. Pharmacol. Physiol. 10:131 (1983)), pivopril, YS980, teprotide (Bradykinin potentiator BPP9a CAS RN 35115-60-7), BRL 36,378 (Smith Kline Beecham, see EP80822 and EP60668), MC-838 (Chugai, see C.A. 102:72588v and Jap. J. Pharmacol. 40:373 (1986), CGS 14824 (Ciba-Geigy, 3-([1-ethoxycarbonyl-3-phenyl-(1S)-propyl]amino)-2,3,4,5-tetrahydro-2-ox-o-1-(3S)-benzazepine-1 acetic acid HCl, see U.K. Patent No. 2103614), CGS 16,617 (Ciba-Geigy, 3(S)-[[(1S)-5-amino-1-carboxypentyl]amino]-2,3,4,-5-tetrahydro-2-oxo-1H-1-benzazepine-1-ethanoic acid, see U.S. Pat. No. 4,473,575), Ru 44570 (Hoechst, see Arzneimittelforschung 34:1254 (1985)), R 31-2201 (Hoffman-LaRoche see FEBS Lett. 165:201 (1984)), CI925 (Pharmacologist 26:243, 266 (1984)), WY-44221 (Wyeth, see J. Med. Chem. 26:394 (1983)), and those disclosed in US2003006922 (paragraph 28), U.S. Pat. No. 4,337,201, U.S. Pat. No. 4,432,971 (phosphonamidates); neutral endopeptidase inhibitors such as omapatrilat (Vanlev®), CGS 30440, cadoxatril and ecadotril, fasidotril (also known as aladotril or alatriopril), sampatrilat, mixanpril, and gemopatrilat, AVE7688, ER4030, and those disclosed in U.S. Pat. No. 5,362,727, U.S. Pat. No. 5,366,973, U.S. Pat. No. 5,225,401, U.S. Pat. No. 4,722,810, U.S. Pat. No. 5,223,516, U.S. Pat. No. 4,749,688, U.S. Pat. No. 5,552,397, U.S. Pat. No. 5,504,080, U.S. Pat. No. 5,612,359, U.S. Pat. No. 5,525,723, EP0599444, EP0481522, EP0599444, EP0595610, EP0534363, EP534396, EP534492, EP0629627; endothelin antagonists such as tezosentan, A308165, and YM62899, and the like; vasodilators such as hydralazine (apresoline), clonidine (clonidine hydrochloride (1H-Imidazol-2-amine, N-(2,6-dichlorophenyl)4,5-dihydro-, monohydrochloride CAS RN 4205-91-8), catapres, minoxidil (loniten), nicotinyl alcohol (roniacol), diltiazem hydrochloride (such as 1,5-Benzothiazepin-4(5H)-one,3-(acetyloxy)-5[2-(dimethylamino)ethyl]-2,-3-dihydro-2(4-methoxyphenyl)-, monohydrochloride, (+)-cis, e.g., Tiazac®, Forest), isosorbide dinitrate (such as 1,4:3,6-dianhydro-D-glucitol 2,5-dinitrate e.g., Isordil® Titradose®, Wyeth-Ayerst), sosorbide mononitrate (such as 1,4:3,6-dianhydro-D-glucito-1,5-nitrate, an organic nitrate, e.g., Ismo®, Wyeth-Ayerst), nitroglycerin (such as 2,3 propanetriol trinitrate, e.g., Nitrostat® Parke-Davis), verapamil hydrochloride (such as benzeneacetonitrile, (±)-(alpha)[3-[[2-(3,4 dimethoxyphenyl)ethyl]methylamino]propyl]-3,4-dimethoxy-(alpha)-(1-methylethyl) hydrochloride, e.g., Covera HS® Extended-Release, Searle), chromonar (which may be prepared as disclosed in U.S. Pat. No. 3,282,938), clonitate (Annalen 1870 155), droprenilamine (which may be prepared as disclosed in DE2521113), lidoflazine (which may be prepared as disclosed in U.S. Pat. No. 3,267,104); prenylamine (which may be prepared as disclosed in U.S. Pat. No. 3,152,173), propatyl nitrate (which may be prepared as disclosed in French Patent No. 1,103,113), mioflazine hydrochloride (1-piperazineacetamide, 3-(aminocarbonyl)-4-[4,4-bis(4-fluorophenyl)butyl]-N-(2,6-dichlorophenyl)-, dihydrochloride CAS RN 83898-67-3), mixidine (Benzeneethanamine, 3,4-dimethoxy-N-(1-methyl-2-pyrrolidinylidene)-Pyrrolidine, 2-[(3,4-dimethoxyphenethyl)imino]-[1-methyl-1-Methyl-2-[(3,4-dimethoxyphenethyl)imino]pyrrolidine CAS RN 27737-38-8), molsidomine (1,2,3-Oxadiazolium, 5-[(ethoxycarbonyl)amino]-3-(4-morpholinyl)-, inner salt CAS RN 25717-80-0), isosorbide mononitrate (D-Glucitol, 1,4:3,6-dianhydro-, 5-nitrate CAS RN 16051-77-7), erythrityl tetranitrate (1,2,3,4-Butanetetrol, tetranitrate, (2R,3S)-rel-CAS RN 7297-25-8), clonitrate(1,2-Propanediol, 3-chloro-, dinitrate (7CI, 8CI, 9CI) CAS RN 2612-33-1), dipyridamole Ethanol, 2,2′,2″,2′″-[(4,8-di-1-piperidinylpyrimido[5,4-d]pyrimidine-2,6-diyl)dinitrilo]tetrakis-CAS RN 58-32-2), nicorandil (CAS RN 65141-46-0 3-), pyridinecarboxamide (N-[2-(nitrooxy)ethyl]-Nisoldipine3,5-Pyridinedicarboxylic acid, 1,4-dihydro-2,6-dimethyl-4-(2-nitrophenyl)-, methyl 2-methylpropyl ester CAS RN 63675-72-9), nifedipine3,5-Pyridinedicarboxylic acid, 1,4-dihydro-2,6-dimethyl-4-(2-nitrophenyl)-, dimethyl ester CAS RN 21829-25-4), perhexyline maleate (Piperidine, 2-(2,2-dicyclohexylethyl)-, (2Z)-2-butenedioate (1:1) CAS RN 6724-53-4), oxprenolol hydrochloride (2-Propanol, 1-[(1-methylethyl)amino]-3-[2-(2-propenyloxy)phenoxy]-, hydrochloride CAS RN 6452-73-9), pentrinitrol (1,3-Propanediol, 2,2-bis[(nitrooxy)methyl]-mononitrate (ester) CAS RN 1607-17-6), verapamil (Benzeneacetonitrile, α-[3-[[2-(3,4-dimethoxyphenyl)ethyl]-methylamino]propyl]-3,4-dimethoxy-α-(1-methylethyl)-CAS RN 52-53-9) and the like; angiotensin II receptor antagonists such as, aprosartan, zolasartan, olmesartan, pratosartan, FI6828K, RNH6270, candesartan (1H-Benzimidazole-7-carboxylic acid, 2-ethoxy-1-[[2′-(1H-tetrazol-5-yl)[1,1′-biphenyl]4-yl]methyl]-CAS RN 139481-59-7), candesartan cilexetil ((+/−)-1-(cyclohexylcarbonyloxy)ethyl-2-ethoxy-1-[[2′-(1H-tetrazol-5-yl)biphenyl-4-yl]-1H-benzimidazole carboxylate, CAS RN 145040-37-5, U.S. Pat. No. 5,703,110 and U.S. Pat. No. 5,196,444), eprosartan (3-[1-4-carboxyphenylmethyl)-2-n-butyl-imidazol-5-yl]-(2-thienylmethyl) propenoic acid, U.S. Pat. No. 5,185,351 and U.S. Pat. No. 5,650,650), irbesartan (2-n-butyl-3-[[2′-(1 h-tetrazol-5-yl)biphenyl-4-yl]methyl]1,3-diazazspiro[4,4]non-1-en-4-one, U.S. Pat. No. 5,270,317 and U.S. Pat. No. 5,352,788), losartan (2-N-butyl-4-chloro-5-hydroxymethyl-1-[(2′-(1H-tetrazol-5-yl)biphenyl-4-yl)-methyl]imidazole, potassium salt, U.S. Pat. No. 5,138,069, U.S. Pat. No. 5,153,197 and U.S. Pat. No. 5,128,355), tasosartan (5,8-dihydro-2,4-dimethyl-8-[(2′-(1H-tetrazol-5-yl)[1,1′-biphenyl]4-yl)methyl]-pyrido[2,3-d]pyrimidin-7(6H)-one, U.S. Pat. No. 5,149,699), telmisartan (4′-[(1,4-dimethyl-2′-propyl-(2,6′-bi-1H-benzimidazol)-1′-yl)]-[1,1′-biphenyl]-2-carboxylic acid, CAS RN 144701-48-4, U.S. Pat. No. 5,591,762), milfasartan, abitesartan, valsartan (Diovan® (Novartis), (S)—N-valeryl-N-[[2′-(1H-tetrazol-5-yl)biphenyl-4-yl)methyl]valine, U.S. Pat. No. 5,399,578), EXP-3137 (2-N-butyl-4-chloro-1-[(2′-(1H-tetrazol-5-yl)biphenyl-4-yl)-methyl]imidazole-5-carboxylic acid, U.S. Pat. No. 5,138,069, U.S. Pat. No. 5,153,197 and U.S. Pat. No. 5,128,355), 3-(2′-(tetrazol-5-yl)-1,1′-biphen-4-yl)methyl-5,7-dimethyl-2-ethyl-3H-imidazo[4,5-b]pyridine, 4′[2-ethyl-4-methyl-6-(5,6,7,8-tetrahydroimidazo[1,2-a]pyridin-2-yl]-benzimidazol-1-yl]-methyl]-1,1′-biphenyl]-2-carboxylic acid, 2-butyl-6-(1-methoxy-1-methylethyl)-2-[2′-)IH-tetrazol-5-yl)biphenyl-4-ylmethyl]quinazolin-4(3H)-one, 3-[2′-carboxybiphenyl-4-yl)methyl]-2-cyclopropyl-7-methyl-3H-imidazo[4,5-b]pyridine, 2-butyl-4-chloro-1-[(2′-tetrazol-5-yl)biphenyl-4-yl)methyl]imidazole-carboxylic acid, 2-butyl-4-chloro-1-[[2′-(1H-tetrazol-5-yl)[1,1′-biphenyl]-4-yl]methyl]-1H-imidazole-5-carboxylic acid-1-(ethoxycarbonyl-oxy)ethyl ester potassium salt, dipotassium 2-butyl-4-(methylthio)-1-[[2-[[[(propylamino)carbonyl]amino]-sulfonyl](1,1′-biphenyl)-4-yl]methyl]-1H-imidazole-5-carboxylate, methyl-2-[[4-butyl-2-methyl-6-oxo-5-[[2′-(1H-tetrazol-5-yl)-[1,1′-biphenyl]-4-yl]methyl]-1-(6H)-pyrimidinyl]methyl]-3-thiophencarboxylate, 5-[(3,5-dibutyl-1H-1,2,4-triazol-1-yl)methyl]-2-[2-(1H-tetrazol-5-ylphenyl)]pyridine, 6-butyl-2-(2-phenylethyl)-5[[2′-(1H-tetrazol-5-yl)[1,1′-biphenyl]-4-methyl]pyrimidin-4-(3H)-one D,L lysine salt, 5-methyl-7-n-propyl-8-[[2′-(1H-tetrazol-5-yl)biphenyl-4-yl]methyl]-[1,2,4]-triazolo[1,5-c]pyrimidin-2(3H)-one, 2,7-diethyl-5-[[2′-(5-tetrazoly)biphenyl-4-yl]methyl]-5H-pyrazolo[1,5-b][1,2,4]triazole potassium salt, 2-[2-butyl-4,5-dihydro-4-oxo-3-[2′-(1H-tetrazol-5-yl)-4-biphenylmethyl]-3H-imidazol[4,5-c]pyridine-5-ylmethyl]benzoic acid, ethyl ester, potassium salt, 3-methoxy-2,6-dimethyl-4-[[2′(1H-tetrazol-5-yl)-1,1′-biphenyl-4-yl]methoxy]pyridine, 2-ethoxy-1-[[2′-(5-oxo-2,5-dihydro-1,2,4-oxadiazol-3-yl)biphenyl-4-yl]methyl]-1H-benzimidazole-7-carboxylic acid, 1-[N-(2′-(1H-tetrazol-5-yl)biphenyl-4-yl-methyl)-N-valerolylaminomethyl)cyclopentane-1-carboxylic acid, 7-methyl-2n-propyl-3-[[2′ 1H-tetrazol-5-yl)biphenyl-4-yl]methyl]-3H-imidazo[4,5-6]pyridine, 2-[5-[(2-ethyl-5,7-dimethyl-3H-imidazo[4,5-b]pyridine-3-yl)methyl]-2-quinolinylisodium benzoate, 2-butyl-6-chloro-4-hydroxymethyl-5-methyl-3-[[2′-(1H-tetrazol-5-yl)biphenyl-4-yl]methyl]pyridine, 2-[[[2-butyl-1-[(4-carboxyphenyl)methyl]-1H-imidazol-5-yl]methyl]amino]benzoic acid tetrazol-5-yl)biphenyl-4-yl]methyl]pyrimidin-6-one, 4(S)-[4-(carboxymethyl)phenoxy]-N-[2(R)-[4-(2-sulfobenzamido)imidazol-1-yl]octanoyl]-L-proline, 1-(2,6-dimethylphenyl)-4-butyl-1,3-dihydro-3-[[6-[2-(1H-tetrazol-5-yl)phenyl]-3-pyridinyl]methyl]-2H-imidazol-2-one, 5,8-ethano-5,8-dimethyl-2-n-propyl-5,6,7,8-tetrahydro-1-[[2′(1H-tetrazol-5-yl)biphenyl-4-yl]methyl]-1H,4H-1,3,4a,8a-tetrazacyclopentanaphthalene-9-one, 4-[1-[2′-(1,2,3,4-tetrazol-5-yl)biphen-4-yl)methylamino]-5,6,7,8-tetrahydro-2-trifylquinazoline, 2-(2-chlorobenzoyl)imino-5-ethyl-3-[2′-(1H-tetrazole-5-yl)biphenyl-4-yl)methyl-1,3,4-thiadiazoline, 2-[5-ethyl-3-[2-(1H-tetrazole-5-yl)biphenyl-4-yl]methyl-1,3,4-thiazoline-2-ylidene]aminocarbonyl-1-cyclopentencarboxylic acid dipotassium salt, and 2-butyl-4-[N-methyl-N-(3-methylcrotonoyl)amino]-1-[[2′-(1H-tetrazol-5-yl)biphenyl-4-yl]methyl]-1H-imidzole-5-carboxylic acid 1-ethoxycarbonyloxyethyl ester, those disclosed in patent publications EP475206, EP497150, EP539086, EP539713, EP535463, EP535465, EP542059, EP497121, EP535420, EP407342, EP415886, EP424317, EP435827, EP433983, EP475898, EP490820, EP528762, EP324377, EP323841, EP420237, EP500297, EP426021, EP480204, EP429257, EP430709, EP434249, EP446062, EP505954, EP524217, EP514197, EP514198, EP514193, EP514192, EP450566, EP468372, EP485929, EP503162, EP533058, EP467207 EP399731, EP399732, EP412848, EP453210, EP456442, EP470794, EP470795, EP495626, EP495627, EP499414, EP499416, EP499415, EP511791, EP516392, EP520723, EP520724, EP539066, EP438869, EP505893, EP530702, EP400835, EP400974, EP401030, EP407102, EP411766, EP409332, EP412594, EP419048, EP480659, EP481614, EP490587, EP467715, EP479479, EP502725, EP503838, EP505098, EP505111 EP513,979 EP507594, EP510812, EP511767, EP512675, EP512676, EP512870, EP517357, EP537937, EP534706, EP527534, EP540356, EP461040, EP540039, EP465368, EP498723, EP498722, EP498721, EP515265, EP503785, EP501892, EP519831, EP532410, EP498361, EP432737, EP504888, EP508393, EP508445, EP403159, EP403158, EP425211, EP427463, EP437103, EP481448, EP488532, EP501269, EP500409, EP540400, EP005528, EP028834, EP028833, EP411507, EP425921, EP430300, EP434038, EP442473, EP443568, EP445811, EP459136, EP483683, EP518033, EP520423, EP531876, EP531874, EP392317, EP468470, EP470543, EP502314, EP529253, EP543263, EP540209, EP449699, EP465323, EP521768, EP415594, WO92/14468, WO93/08171, WO93/08169, WO91/00277, WO91/00281, WO91/14367, WO92/00067, WO92/00977, WO92/20342, WO93/04045, WO93/04046, WO91/15206, WO92/14714, WO92/09600, WO92/16552, WO93/05025, WO93/03018, WO91/07404, WO92/02508, WO92/13853, WO91/19697, WO91/11909, WO91/12001, WO91/11999, WO91/15209, WO91/15479, WO92/20687, WO92/20662, WO92/20661, WO93/01177, WO91/14679, WO91/13063, WO92/13564, WO91/17148, WO91/18888, WO91/19715, WO92/02257, WO92/04335, WO92/05161, WO92/07852, WO92/15577, WO93/03033, WO91/16313, WO92/00068, WO92/02510, WO92/09278, WO9210179, WO92/10180, WO92/10186, WO92/10181, WO92/10097, WO92/10183, WO92/10182, WO92/10187, WO92/10184, WO92/10188, WO92/10180, WO92/10185, WO92/20651, WO93/03722, WO93/06828, WO93/03040, WO92/19211, WO92/22533, WO92/06081, WO92/05784, WO93/00341, WO92/04343, WO92/04059, U.S. Pat. No. 5,104,877, U.S. Pat. No. 5,187,168, U.S. Pat. No. 5,149,699, U.S. Pat. No. 5,185,340, U.S. Pat. No. 4,880,804, U.S. Pat. No. 5,138,069, U.S. Pat. No. 4,916,129, U.S. Pat. No. 5,153,197, U.S. Pat. No. 5,173,494, U.S. Pat. No. 5,137,906, U.S. Pat. No. 5,155,126, U.S. Pat. No. 5,140,037, U.S. Pat. No. 5,137,902, U.S. Pat. No. 5,157,026, U.S. Pat. No. 5,053,329, U.S. Pat. No. 5,132,216, U.S. Pat. No. 5,057,522, U.S. Pat. No. 5,066,586, U.S. Pat. No. 5,089,626, U.S. Pat. No. 5,049,565, U.S. Pat. No. 5,087,702, U.S. Pat. No. 5,124,335, U.S. Pat. No. 5,102,880, U.S. Pat. No. 5,128,327, U.S. Pat. No. 5,151,435, U.S. Pat. No. 5,202,322, U.S. Pat. No. 5,187,159, U.S. Pat. No. 5,198,438, U.S. Pat. No. 5,182,288, U.S. Pat. No. 5,036,048, U.S. Pat. No. 5,140,036, U.S. Pat. No. 5,087,634, U.S. Pat. No. 5,196,537, U.S. Pat. No. 5,153,347, U.S. Pat. No. 5,191,086, U.S. Pat. No. 5,190,942, U.S. Pat. No. 5,177,097, U.S. Pat. No. 5,212,177, U.S. Pat. No. 5,208,234, U.S. Pat. No. 5,208,235, U.S. Pat. No. 5,212,195, U.S. Pat. No. 5,130,439, U.S. Pat. No. 5,045,540, U.S. Pat. No. 5,041,152, and U.S. Pat. No. 5,210,204, and pharmaceutically acceptable salts and esters thereof, α/β adrenergic blockers such as nipradilol, arotinolol, amosulalol, bretylium tosylate (CAS RN: 61-75-6), dihydroergtamine mesylate (such as ergotaman-3′, 6′,18-trione,9,-10-dihydro-12′-hydroxy-2′-methyl-5′-(phenylmethyl)-, (5′(a))-, monomethanesulfonate, e.g., DHE 45® Injection, Novartis), carvedilol (such as (±)-1-(Carbazol-4-yloxy)-3-[[2-(o-methoxyphenoxy)ethyl]amino]-2-propanol, e.g., Coreg®, SmithKline Beecham), labetalol (such as 5-[1-hydroxy-2-[(1-methyl-3-phenylpropyl) amino]ethyl]salicylamide monohydrochloride, e.g., Normodyne®, Schering), bretylium tosylate (Benzenemethanaminium, 2-bromo-N-ethyl-N,N-dimethyl-, salt with 4-methylbenzenesulfonic acid (1:1) CAS RN 61-75-6), phentolamine mesylate (Phenol, 3-[[(4,5-dihydro-1H-imidazol-2-yl)methyl](4-methylphenyl)amino]-, monomethanesulfonate (salt) CAS RN 65-28-1), solypertine tartrate (5H-1,3-Dioxolo[4,5-f]indole, 7-[2-[4-(2-methoxyphenyl)-1-piperazinyl]ethyl]-, (2R,3R)-2,3-dihydroxybutanedioate (1:1) CAS RN 5591-43-5), zolertine hydrochloride (piperazine, 1-phenyl4-[2-(1H-tetrazol-5-yl)ethyl]-, monohydrochloride (8Cl, 9Cl) CAS RN 7241-94-3) and the like;
α adrenergic receptor blockers, such as alfuzosin (CAS RN: 81403-68-1), terazosin, urapidil, prazosin (Minipress®), tamsulosin, bunazosin, trimazosin, doxazosin, naftopidil, indoramin, WHP 164, XEN010, fenspiride hydrochloride (which may be prepared as disclosed in U.S. Pat. No. 3,399,192), proroxan (CAS RN 33743-96-3), and labetalol hydrochloride and combinations thereof, a 2 agonists such as methyldopa, methyldopa HCL, lofexidine, tiamenidine, moxonidine, rilmenidine, guanobenz, and the like;
aldosterone inhibitors, and the like; renin inhibitors including Aliskiren (SPP 100; Novartis/Speedel); angiopoietin-2-binding agents such as those disclosed in WO03/030833;
anti-angina agents such as ranolazine (hydrochloridel-piperazineacetamide, N-(2,6-dimethylphenyl)-4-[2-hydroxy-3-(2-methoxyphenoxy)propyl]-, dihydrochloride CAS RN 95635-56-6), betaxolol hydrochloride (2-Propanol, 1-[4-[2 (cyclopropylmethoxy)ethyl]phenoxy]-3-[(1-methylethyl)amino]-, hydrochloride CAS RN 63659-19-8), butoprozine hydrochloride (Methanone, [4-[3(dibutylamino)propoxy]phenyl](2-ethyl-3-indolizinyl)-, monohydrochloride CAS RN 62134-34-3), cinepazet maleatel-piperazineacetic acid, 4-[1-oxo-3-(3,4,5-trimethoxyphenyl)-2-propenyl]-, ethyl ester, (2Z)-2-butenedioate (1:1) CAS RN 50679-07-7), tosifen (Benzenesulfonamide, 4-methyl-N-[[[(1S)-1-methyl-2-phenylethyl]amino]carbonyl]-CAS RN 32295-184), verapamilhydrochloride (Benzeneacetonitrile, α-[3-[[2-(3,4-dimethoxyphenyl)ethyl]methylamino]propyl]-3,4-dimethoxy-α-(1-methylethyl)-, monohydrochloride CAS RN 152-114), molsidomine (1,2,3-Oxadiazolium, 5-[(ethoxycarbonyl)amino]-3-(4-morpholinyl)-, inner salt CAS RN 25717-80-0), and ranolazine hydrochloride (1-Piperazineacetamide, N-(2,6-dimethylphenyl)₄-[2-hydroxy-3-(2-meth-oxyphenoxy)propyl]-, dihydrochloride CAS RN 95635-56-6); tosifen (Benzenesulfonamide, 4-methyl-N-[[[(1S)-1-methyl-2-phenylethyl]amino]carbonyl]-CAS RN 32295-184); adrenergic stimulants such as guanfacine hydrochloride (such as N-amidino-2-(2,6-dichlorophenyl) acetamide hydrochloride, e.g., Tenex® Tablets available from Robins); methyldopa-hydrochlorothiazide (such as levo-3-(3,4-dihydroxyphenyl)-2-methylalanine) combined with Hydrochlorothiazide (such as 6-chloro-3,4-dihydro-2H-1,2,4-benzothiadiazine-7-sulfonamide 1,1-dioxide, e.g., the combination as, e.g., Aldoril® Tablets available from Merck), methyldopa-chlorothiazide (such as 6-chloro-2H-1,2,4-benzothiadiazine-7-sulfonamide 1,1-dioxide and methyldopa as described above, e.g., Aldoclor®, Merck), clonidine hydrochloride (such as 2-(2,6-dichlorophenylamino)-2-imidazoline hydrochloride and chlorthalidone (such as 2-chloro-5-(1-hydroxy-3-oxo-1-isoindolinyl) benzenesulfonamide), e.g., Combipres®, Boehringer Ingelheim), clonidine hydrochloride (such as 2-(2,6-dichlorophenylamino)-2-imidazoline hydrochloride, e.g., Catapres®, Boehringer Ingelheim), clonidine (1H-Imidazol-2-amine, N-(2,6-dichlorophenyl)4,5-dihydro-CAS RN 4205-90-7), Hyzaar (Merck; a combination of losartan and hydrochlorothiazide), Co-Diovan (Novartis; a combination of valsartan and hydrochlorothiazide, Lotrel (Novartis; a combination of benazepril and amlodipine) and Caduet (Pfizer; a combination of amlodipine and atorvastatin), and those agents disclosed in US20030069221.

[0482] The guanylin potentiating agents described herein can be used in combination therapy with one or more of the following agents useful in the treatment of respiratory and other disorders including but not limited to:

(1) β-agonists including but not limited to: albuterol (PROVENTIL®, SALBUTAMOI®, VENTOLIN®), bambuterol, bitoterol, clenbuterol, fenoterol, formoterol, isoetharine (BRONKOSOL®, BRONKOMETER®), metaproterenol (ALUPENT®, METAPREL®), pirbuterol (MAXAIR®), reproterol, rimiterol, salmeterol, terbutaline (BRETHAIRE®, BRETHINE®, BRICANYL®), adrenalin, isoproterenol (ISUPREL®), epinephrine bitartrate (PRIMATENE®), ephedrine, orciprenline, fenoterol and isoetharine;
(2) steroids, including but not limited to beclomethasone, beclomethasone dipropionate, betamethasone, budesonide, bunedoside, butixocort, dexamethasone, flunisolide, fluocortin, fluticasone, hydrocortisone, methyl prednisone, mometasone, predonisolone, predonisone, tipredane, tixocortal, triamcinolone, and triamcinolone acetonide;
(3) β-agonist-corticosteroid combinations [e.g., salmeterol-fluticasone (ADVAIR®), formoterol-budesonid (SYMBICORT®)];
(4) leukotriene D4 receptor antagonists/leukotriene antagonists/LTD4 antagonists (i.e., any compound that is capable of blocking, inhibiting, reducing or otherwise interrupting the interaction between leukotrienes and the Cys LTI receptor) including but not limited to: zafirlukast, montelukast, montelukast sodium (SINGULAIR®), pranlukast, iralukast, pobilukast, SKB-106,203 and compounds described as having LTD4 antagonizing activity described in U.S. Pat. No. 5,565,473;
(5) 5-lipoxygenase inhibitors and/or leukotriene biosynthesis inhibitors [e.g., zileuton and BAY1005 (CA registry 128253-31-6)];
(6) histamine H1 receptor antagonists/antihistamines (i.e., any compound that is capable of blocking, inhibiting, reducing or otherwise interrupting the interaction between histamine and its receptor) including but not limited to: astemizole, acrivastine, antazoline, azatadine, azelastine, astamizole, bromopheniramine, bromopheniramine maleate, carbinoxamine, carebastine, cetirizine, chlorpheniramine, chloropheniramine maleate, cimetidine, clemastine, cyclizine, cyproheptadine, descarboethoxyloratadine, dexchlorpheniramine, dimethindene, diphenhydramine, diphenylpyraline, doxylamine succinate, doxylamine, ebastine, efletirizine, epinastine, farnotidine, fexofenadine, hydroxyzine, hydroxyzine, ketotifen, levocabastine, levocetirizine, levocetirizine, loratadine, meclizine, mepyramine, mequitazine, methdilazine, mianserin, mizolastine, noberastine, norasternizole, noraztemizole, phenindamine, pheniramine, picumast, promethazine, pynlamine, pyrilamine, ranitidine, temelastine, terfenadine, trimeprazine, tripelenamine, and triprolidine;
(7) an anticholinergic including but not limited to: atropine, benztropine, biperiden, flutropium, hyoscyamine, ilutropium, ipratropium, ipratropium bromide, methscopolamine, oxybutinin, rispenzepine, scopolamine, and tiotropium;
(8) an anti-tussive including but not limited to: dextromethorphan, codeine, and hydromorphone;
(9) a decongestant including but not limited to: pseudoephedrine and phenylpropanolamine;
(10) an expectorant including but not limited to: guafenesin, guaicolsulfate, terpin, ammonium chloride, glycerol guaicolate, and iodinated glycerol;
(11) a bronchodilator including but not limited to: theophylline and aminophylline;
(12) an anti-inflammatory including but not limited to: fluribiprofen, diclophenac, indomethacin, ketoprofen, S-ketroprophen, tenoxicam;
(13) a PDE (phosphodiesterase) inhibitor including but not limited to those disclosed herein;
(14) a recombinant humanized monoclonal antibody [e.g. xolair (also called omalizumab), rhuMab, and talizumab];
(15) a humanized lung surfactant including recombinant forms of surfactant proteins SP-B, SP—C or SP-D [e.g. SURFAXIN®, formerly known as dsc-104 (Discovery Laboratories)],
(16) agents that inhibit epithelial sodium channels (ENaC) such as amiloride and related compounds;
(17) antimicrobial agents used to treat pulmonary infections such as acyclovir, amikacin, amoxicillin, doxycycline, trimethoprin sulfamethoxazole, amphotericin B, azithromycin, clarithromycin, roxithromycin, clarithromycin, cephalosporins(ceffoxitin, cefmetazole etc), ciprofloxacin, ethambutol, gentimycin, ganciclovir, imipenem, isoniazid, itraconazole, penicillin, ribavirin, rifampin, rifabutin, amantadine, rimantidine, streptomycin, tobramycin, and vancomycin;
(18) agents that activate chloride secretion through Ca++ dependent chloride channels (such as purinergic receptor (P2Y(2) agonists);
(19) agents that decrease sputum viscosity, such as human recombinant DNase 1, (Pulmozyme®);
(20) nonsteroidal anti-inflammatory agents (acemetacin, acetaminophen, acetyl salicylic acid, alclofenac, alminoprofen, apazone, aspirin, benoxaprofen, bezpiperylon, bucloxic acid, carprofen, clidanac, diclofenac, diclofenac, diflunisal, diflusinal, etodolac, fenbufen, fenbufen, fenclofenac, fenclozic acid, fenoprofen, fentiazac, feprazone, flufenamic acid, flufenisal, flufenisal, fluprofen, flurbiprofen, flurbiprofen, furofenac, ibufenac, ibuprofen, indomethacin, indomethacin, indoprofen, isoxepac, isoxicam, ketoprofen, ketoprofen, ketorolac, meclofenamic acid, meclofenamic acid, mefenamic acid, mefenamic acid, miroprofen, mofebutazone, nabumetone oxaprozin, naproxen, naproxen, niflumic acid, oxaprozin, oxpinac, oxyphenbutazone, phenacetin, phenylbutazone, phenylbutazone, piroxicam, piroxicam, pirprofen, pranoprofen, sudoxicam, tenoxican, sulfasalazine, sulindac, sulindac, suprofen, tiaprofenic acid, tiopinac, tioxaprofen, tolfenamic acid, tolmetin, tolmetin, zidometacin, zomepirac, and zomepirac); and
(21) aerosolized antioxidant therapeutics such as S-Nitrosoglutathione.

[0483] The guanylin potentiating agents described herein can be used in combination therapy with an anti-obesity agent. Suitable such agents include, but are not limited to:

11β HSD-1 (11-beta hydroxy steroid dehydrogenase type 1) inhibitors, such as BVT 3498, BVT 2733, 3-(1-adamantyl)-4-ethyl-5-(ethylthio)-4H-1,2,4-triazole, 3-(1-adamantyl)-5-(3,4,5-trimethoxyphenyl)-4-methyl-4H-1,2,4-triazole, 3-adamantanyl-4,5,6,7,8,9,10,11,12,3a-decahydro-1,2,4-triazolo[4,3-a][11]annulene, and those compounds disclosed in WO01/90091, WO01/90090, WO01/90092 and WO02/072084;
5HT antagonists such as those in WO03/037871, WO03/037887, and the like;
5HT1a modulators such as carbidopa, benserazide and those disclosed in U.S. Pat. No. 6,207,699, WO03/031439, and the like;
5HT2c (serotonin receptor 2c) agonists, such as BVT933, DPCA37215, IK264, PNU 22394, WAY161503, R-1065, SB 243213 (Glaxo Smith Kline) and YM 348 and those disclosed in U.S. Pat. No. 3,914,250, WO00/77010, WO02/36596, WO02/48124, WO02/10169, WO01/66548, WO02/44152, WO02/51844, WO02/40456, and WO02/40457;
5HT6 receptor modulators, such as those in WO03/030901, WO03/035061, WO03/039547, and the like;
acyl-estrogens, such as oleoyl-estrone, disclosed in del Mar-Grasa, M. et al., Obesity Research, 9:202-9 (2001) and Japanese Patent Application No. JP 2000256190;
anorectic bicyclic compounds such as 1426 (Aventis) and 1954 (Aventis), and the compounds disclosed in WO00/18749, WO01/32638, WO01/62746, WO01/62747, and WO03/015769;
CB 1 (cannabinoid-1 receptor) antagonist/inverse agonists such as rimonabant (Acomplia; Sanofi), SR-147778 (Sanofi), SR-141716 (Sanofi), BAY 65-2520 (Bayer), and SLV 319 (Solvay), and those disclosed in patent publications U.S. Pat. No. 4,973,587, U.S. Pat. No. 5,013,837, U.S. Pat. No. 5,081,122, U.S. Pat. No. 5,112,820, U.S. Pat. No. 5,292,736, U.S. Pat. No. 5,532,237, U.S. Pat. No. 5,624,941, U.S. Pat. No. 6,028,084, U.S. Pat. No. 6,509,367, U.S. Pat. No. 6,509,367, WO96/33159, WO97/29079, WO98/31227, WO98/33765, WO98/37061, WO98/41519, WO98/43635, WO98/43636, WO99/02499, WO00/10967, WO00/10968, WO01/09120, WO01/58869, WO01/64632, WO01/64633, WO01/64634, WO01/70700, WO01/96330, WO02/076949, WO03/006007, WO03/007887, WO03/020217, WO03/026647, WO03/026648, WO03/027069, WO03/027076, WO03/027114, WO03/037332, WO03/040107, WO03/086940, WO03/084943 and EP658546;
CCK-A (cholecystokinin-A) agonists, such as AR-R 15849, GI 181771 (GSK), JMV-180, A-71378, A-71623 and SR146131 (Sanofi), and those described in U.S. Pat. No. 5,739,106;
CNTF (Ciliary neurotrophic factors), such as GI-181771 (Glaxo-SmithKline), SR146131 (Sanofi Synthelabo), butabindide, PD170,292, and PD 149164 (Pfizer);
CNTF derivatives, such as Axokine® (Regeneron), and those disclosed in WO94/09134, WO98/22128, and WO99/43813;
dipeptidyl peptidase IV (DP-IV) inhibitors, such as isoleucine thiazolidide, valine pyrrolidide, NVP-DPP728, LAF237, P93/01, P 3298, TSL 225 (tryptophyl-1,2,3,4-tetrahydroisoquinoline-3-carboxylic acid; disclosed by Yamada et al, Bioorg. & Med. Chem. Lett. 8 (1998) 1537-1540), TMC-2A/2B/2C, CD26 inhibtors, FE 999011, P9310/K364, VIP 0177, SDZ 274-444, 2-cyanopyrrolidides and 4-cyanopyrrolidides as disclosed by Ashworth et al, Bioorg. & Med. Chem. Lett., Vol. 6, No. 22, pp 1163-1166 and 2745-2748 (1996) and the compounds disclosed patent publications. WO99/38501, WO99/46272, WO99/67279 (Probiodrug), WO99/67278 (Probiodrug), WO99/61431 (Probiodrug), WO02/083128, WO02/062764, WO03/000180, WO03/000181, WO03/000250, WO03/002530, WO03/002531, WO03/002553, WO03/002593, WO03/004498, WO03/004496, WO03/017936, WO03/024942, WO03/024965, WO03/033524, WO03/037327 and EP1258476; growth hormone secretagogue receptor agonists/antagonists, such as NN703, hexarelin, MK-0677 (Merck), SM-130686, CP-424391 (Pfizer), LY 444,711 (Eli Lilly), L-692,429 and L-163,255, and such as those disclosed in U.S. Ser. No. 09/662,448, U.S. provisional application 60/203,335, U.S. Pat. No. 6,358,951, US2002049196, US2002/022637, WO01/56592 and WO02/32888;
H3 (histamine H3) antagonist/inverse agonists, such as thioperamide, 3-(1H-imidazol-4-yl)propyl N-(4-pentenyl)carbamate), clobenpropit, iodophenpropit, imoproxifan, GT2394 (Gliatech), and A331440, O-[3-(1H-imidazol-4-yl)propanol]carbamates (Kiec-Kononowicz, K. et al., Pharmazie, 55:349-55 (2000)), piperidine-containing histamine H3-receptor antagonists (Lazewska, D. et al., Pharmazie, 56:927-32 (2001), benzophenone derivatives and related compounds (Sasse, A. et al., Arch. Pharm. (Weinheim) 334:45-52 (2001)), substituted N-phenylcarbamates (Reidemeister, S. et al., Pharmazie, 55:83-6 (2000)), and proxifan derivatives (Sasse, A. et al., J. Med. Chem. 43:3335-43 (2000)) and histamine H3 receptor modulators such as those disclosed in WO02/15905, WO03/024928 and WO03/024929;
leptin derivatives, such as those disclosed in U.S. Pat. No. 5,552,524, U.S. Pat. No. 5,552,523, U.S. Pat. No. 5,552,522, U.S. Pat. No. 5,521,283, WO96/23513, WO96/23514, WO96/23515, WO96/23516, WO96/23517, WO96/23518, WO96/23519, and WO96/23520;
leptin, including recombinant human leptin (PEG-OB, Hoffman La Roche) and recombinant methionyl human leptin (Amgen);
lipase inhibitors, such as tetrahydrolipstatin (orlistat/Xenical®), Triton WR1339, RHC80267, lipstatin, teasaponin, diethylumbelliferyl phosphate, FL-386, WAY-121898, Bay-N-3176, valilactone, esteracin, ebelactone A, ebelactone B, and RHC 80267, and those disclosed in patent publications WO01/77094, U.S. Pat. No. 4,598,089, U.S. Pat. No. 4,452,813, U.S. Pat. No. 5,512,565, U.S. Pat. No. 5,391,571, U.S. Pat. No. 5,602,151, U.S. Pat. No. 4,405,644, U.S. Pat. No. 4,189,438, and U.S. Pat. No. 4,242,453;
lipid metabolism modulators such as maslinic acid, erythrodiol, ursolic acid uvaol, betulinic acid, betulin, and the like and compounds disclosed in WO03/011267; Mc4r (melanocortin 4 receptor) agonists, such as CHIR86036 (Chiron), ME-10142, ME-10145, and HS-131 (Melacure), and those disclosed in PCT publication Nos. WO99/64002, WO00/74679, WO01/991752, WO01/25192, WO01/52880, WO01/74844, WO01/70708, WO01/70337, WO01/91752, WO02/059095, WO02/059107, WO02/059108, WO02/059117, WO02/06276, WO02/12166, WO02/11715, WO02/12178, WO02/15909, WO02/38544, WO02/068387, WO02/068388, WO02/067869, WO02/081430, WO03/06604, WO03/007949, WO03/009847, WO03/009850, WO03/013509, and WO03/031410;
Mc5r (melanocortin 5 receptor) modulators, such as those disclosed in WO97/19952, WO00/15826, WO00/15790, US20030092041;
melanin-concentrating hormone 1 receptor (MCHR) antagonists, such as T-226296 (Takeda), SB 568849, SNP-7941 (Synaptic), and those disclosed in patent publications WO01/21169, WO01/82925, WO01/87834, WO02/051809, WO02/06245, WO02/076929, WO02/076947, WO02/04433, WO02/51809, WO02/083134, WO02/094799, WO03/004027, WO03/13574, WO03/15769, WO03/028641, WO03/035624, WO03/033476, WO03/033480, JP13226269, and JP1437059;
mGluR5 modulators such as those disclosed in WO03/029210, WO03/047581, WO03/048137, WO03/051315, WO03/051833, WO03/053922, WO03/059904, and the like;
serotoninergic agents, such as fenfluramine (such as Pondimin® (Benzeneethanamine, N-ethyl-alpha-methyl-3-(trifluoromethyl)-, hydrochloride), Robbins), dexfenfluramine (such as Redux® (Benzeneethanamine, N-ethyl-alpha-methyl-3-(trifluoromethyl)-, hydrochloride), Interneuron) and sibutramine ((Meridia®, Knoll/Reductil™) including racemic mixtures, as optically pure isomers (+) and (−), and pharmaceutically acceptable salts, solvents, hydrates, clathrates and prodrugs thereof including sibutramine hydrochloride monohydrate salts thereof, and those compounds disclosed in U.S. Pat. No. 4,746,680, U.S. Pat. No. 4,806,570, and U.S. Pat. No. 5,436,272, US20020006964, WO01/27068, and WO01/62341;
NE (norepinephrine) transport inhibitors, such as GW 320659, despiramine, talsupram, and nomifensine;
NPY 1 antagonists, such as BIBP3226, J-115814, BIBO 3304, LY-357897, CP-671906, GI-264879A, and those disclosed in U.S. Pat. No. 6,001,836, WO96/14307, WO01/23387, WO99/51600, WO01/85690, WO01/85098, WO01/85173, and WO01/89528;

[0484] NPY5 (neuropeptide Y Y5) antagonists, such as 152,804, GW-569180A, GW-594884A, GW-587081×, GW-548118×, FR235208, FR226928, FR240662, FR252384, 1229U91, GI-264879A, CGP71683A, LY-377897, LY-366377, PD-160170, SR-120562A, SR-120819A, JCF-104, and H409/22 and those compounds disclosed in patent publications U.S. Pat. No. 6,140,354, U.S. Pat. No. 6,191,160, U.S. Pat. No. 6,218,408, U.S. Pat. No. 6,258,837, U.S. Pat. No. 6,313,298, U.S. Pat. No. 6,326,375, U.S. Pat. No. 6,329,395, U.S. Pat. No. 6,335,345, U.S. Pat. No. 6,337,332, U.S. Pat. No. 6,329,395, U.S. Pat. No. 6,340,683, EP01010691, EP-01044970, WO97/19682, WO97/20820, WO97/20821, WO97/20822, WO97/20823, WO98/27063, WO00/107409, WO00/185714, WO00/185730, WO00/64880, WO00/68197, WO00/69849, WO/0113917, WO01/09120, WO01/14376, WO01/85714, WO01/85730, WO01/07409, WO01/02379, WO01/23388, WO01/23389, WO01/44201, WO01/62737, WO01/62738, WO01/09120, WO02/20488, WO02/22592, WO02/48152, WO02/49648, WO02/051806, WO02/094789, WO03/009845, WO03/014083, WO03/022849, WO03/028726 and Norman et al., J. Med. Chem. 43:4288-4312 (2000);

[0485] opioid antagonists, such as nalmefene (REVEX®), 3-methoxynaltrexone, naloxone, and naltrexone and those disclosed in WO00/21509;

orexin antagonists, such as SB-334867-A and those disclosed in patent publications WO01/96302, WO01/68609, WO02/44172, WO02/51232, WO02/51838, WO02/089800, WO02/090355, WO03/023561, WO03/032991, and WO03/037847;
PDE inhibitors (e.g. compounds which slow the degradation of cyclic AMP (cAMP) and/or cyclic GMP (cGMP) by inhibition of the phosphodiesterases, which can lead to a relative increase in the intracellular concentration of cAMP and cGMP; possible PDE inhibitors are primarily those substances which are to be numbered among the class consisting of the PDE3 inhibitors, the class consisting of the PDE4 inhibitors and/or the class consisting of the PDE5 inhibitors, in particular those substances which can be designated as mixed types of PDE3/4 inhibitors or as mixed types of PDE3/4/5 inhibitors) such as those disclosed in patent publications DE1470341, DE2108438, DE2123328, DE2305339, DE2305575, DE2315801, DE2402908, DE2413935, DE2451417, DE2459090, DE2646469, DE2727481, DE2825048, DE2837161, DE2845220, DE2847621, DE2934747, DE3021792, DE3038166, DE3044568, EP000718, EP0008408, EP0010759, EP0059948, EP0075436, EP0096517, EP0112987, EP0116948, EP0150937, EP0158380, EP0161632, EP0161918, EP0167121, EP0199127, EP0220044, EP0247725, EP0258191, EP0272910, EP0272914, EP0294647, EP0300726, EP0335386, EP0357788, EP0389282, EP0406958, EP0426180, EP0428302, EP0435811, EP0470805, EP0482208, EP0490823, EP0506194, EP0511865, EP0527117, EP0626939, EP0664289, EP0671389, EP0685474, EP0685475, EP0685479, JP92234389, JP94329652, JP95010875, U.S. Pat. No. 4,963,561, U.S. Pat. No. 5,141,931, WO9117991, WO9200968, WO9212961, WO9307146, WO9315044, WO9315045, WO9318024, WO9319068, WO9319720, WO9319747, WO9319749, WO9319751, WO9325517, WO9402465, WO9406423, WO9412461, WO9420455, WO9422852, WO9425437, WO9427947, WO9500516, WO9501980, WO9503794, WO9504045, WO9504046, WO9505386, WO9508534, WO9509623, WO9509624, WO9509627, WO9509836, WO9514667, WO9514680, WO9514681, WO9517392, WO9517399, WO9519362, WO9522520, WO9524381, WO9527692, WO9528926, WO9535281, WO9535282, WO9600218, WO9601825, WO9602541, WO9611917, DE3142982, DE1116676, DE2162096, EP0293063, EP0463756, EP0482208, EP0579496, EP0667345 U.S. Pat. No. 6,331,543, US20050004222 (including those disclosed in formulas I-XIII and paragraphs 37-39, 85-0545 and 557-577), WO9307124, EP0163965, EP0393500, EP0510562, EP0553174, WO9501338 and WO9603399, as well as PDE5 inhibitors (such as Rx-RA-69, SCH-51866, KT-734, vesnarinone, zaprinast, SKF-96231, ER-21355, BF/GP-385, NM-702 and sildenafil (Viagra™)), PDE4 inhibitors (such as etazolate, ICI63197, RP73401, imazolidinone (RO-20-1724), MEM 1414 (R1533/R1500; Pharmacia Roche), denbufylline, rolipram, oxagrelate, nitraquazone, Y-590, DH-6471, SKF-94120, motapizone, lixazinone, indolidan, olprinone, atizoram, KS-506-G, dipamfylline, BMY-43351, atizoram, arofylline, filaminast, PDB-093, UCB-29646, CDP-840, SKF-107806, piclamilast, RS-17597, RS-25344-000, SB-207499, TIBENELAST, SB-210667, SB-211572, SB-211600, SB-212066, SB-212179, GW-3600, CDP-840, mopidamol, anagrelide, ibudilast, aminone, pimobendan, cilostazol, quazinone and N-(3,5-dichloropyrid-4-yl)-3-cyclopropylmethoxy-4-difluoromethoxybenzamide, PDE3 inhibitors (such as ICI153, 100, bemorandane (RWJ 22867), MCI-154, UD-CG 212, sulmazole, ampizone, cilostamide, carbazeran, piroximone, imazodan, CI-930, siguazodan, adibendan, saterinone, SKF-95654, SDZ-MKS-492, 349-U-85, emoradan, EMD-53998, EMD-57033, NSP-306, NSP-307, revizinone, NM-702, WIN-62582 and WIN-63291, enoximone and milrinone, PDE3/4 inhibitors (such as benafentrine, trequinsin, ORG-30029, zardaverine, L-686398, SDZ-ISQ-844, ORG-20241, EMD-54622, and tolafentrine) and other PDE inhibitors (such as vinpocetin, papaverine, enprofylline, cilomilast, fenoximone, pentoxifylline, roflumilast, tadalafil (Clalis®), theophylline, and vardenafil (Levitra®);
Neuropeptide Y2 (NPY2) agonists include but are not limited to: peptide YY and fragments and variants thereof (e.g. YY3-36 (PYY3-36)(N. Engl. J. Med. 349:941, 2003; IKPEAPGE DASPEELNRY YASLRHYLNL VTRQRY (SEQ ID NO:19) and PYY agonists such as those disclosed in WO03/026591, WO03/057235, and WO03/027637;
serotonin reuptake inhibitors, such as, paroxetine, fluoxetine (Prozac™), fluvoxamine, sertraline, citalopram, and imipramine, and those disclosed in U.S. Pat. No. 6,162,805, U.S. Pat. No. 6,365,633, WO03/00663, WO01/27060, and WO01/162341;
thyroid hormone β agonists, such as KB-2611 (KaroBioBMS), and those disclosed in WO02/15845, WO97/21993, WO99/00353, GB98/284425, U.S. Provisional Application No. 60/183,223, and Japanese Patent Application No. JP 2000256190; UCP-1 (uncoupling protein-1), 2, or 3 activators, such as phytanic acid, 4-[(E)-2-(5,6,7,8-tetrahydro-5,5,8,8-tetramethyl-2-napthalenyl)-1-propenyl]benzoic acid (TTNPB), retinoic acid, and those disclosed in WO99/00123;
β3 (beta adrenergic receptor 3) agonists, such as AJ9677/TAK677 (Dainippon/Takeda), L750355 (Merck), CP331648 (Pfizer), CL-316,243, SB 418790, BRL-37344, L-796568, BMS-196085, BRL-35135A, CGP12177A, BTA-243, GW 427353, Trecadrine, Zeneca D7114, N-5984 (Nisshin Kyorin), LY-377604 (Lilly), SR 59119A, and those disclosed in U.S. Pat. No. 5,541,204, U.S. Pat. No. 5,770,615, U.S. Pat. No. 5,491,134, U.S. Pat. No. 5,776,983, U.S. Pat. No. 4,880,64, U.S. Pat. No. 5,705,515, U.S. Pat. No. 5,451,677, WO94/18161, WO95/29159, WO97/46556, WO98/04526 and WO98/32753, WO01/74782, WO02/32897, WO03/014113, WO03/016276, WO03/016307, WO03/024948, WO03/024953 and WO03/037881; noradrenergic agents including, but not limited to, diethylpropion (such as Tenuate® (1-propanone, 2-(diethylamino)-1-phenyl-, hydrochloride), Merrell), dextroamphetamine (also known as dextroamphetamine sulfate, dexamphetamine, dexedrine, Dexampex, Ferndex, Oxydess II, Robese, Spancap #1), mazindol ((or 5-(p-chlorophenyl)-2,5-dihydro-3H-imidazo[2,1-a]isoindol-5-ol) such as Sanorex®, Novartis or Mazanor®, Wyeth Ayerst), phenylpropanolamine (or Benzenemethanol, alpha-(1-aminoethyl)-, hydrochloride), phentermine ((or Phenol, 3-[[4,5-duhydro-1H-imidazol-2-yl)ethyl](4-methylpheny-1)amino], monohydrochloride) such as Adipex-P®, Lemmon, FASTIN®, Smith-Kline Beecham and Ionamin®, Medeva), phendimetrazine ((or (2S,3S)-3,4-Dimethyl-2phenylmorpholine L-(+)-tartrate (1:1)) such as Metra®(Forest), Plegine® (Wyeth-Ayerst), Prelu-2® (Boehringer Ingelheim), and Statobex® (Lemmon), phendamine tartrate (such as Thephorin® (2,3,4,9-Tetrahydro-2-methyl-9-phenyl-1H-indenol[2,1-c]pyridine L-(+)-tartrate (1:1)), Hoffmann-LaRoche), methamphetamine (such as Desoxyn®, Abbot ((S)—N, (alpha)-dimethylbenzeneethanamine hydrochloride)), and phendimetrazine tartrate (such as Bontril® Slow-Release Capsules, Amarin (−3,4-Dimethyl-2-phenylmorpholine Tartrate);
fatty acid oxidation upregulator/inducers such as Famoxin® (Genset);
monamine oxidase inhibitors including but not limited to befloxatone, moclobemide, brofaromine, phenoxathine, esuprone, befol, toloxatone, pirlindol, amiflamine, sercloremine, bazinaprine, lazabemide, milacemide, caroxazone and other certain compounds as disclosed by WO01/12176; and
other anti-obesity agents such as 5HT-2 agonists, ACC (acetyl-CoA carboxylase) inhibitors such as those described in WO03/072197, alpha-lipoic acid (alpha-LA), AOD9604, appetite suppressants such as those in WO03/40107, ATL-962 (Alizyme PLC), benzocaine, benzphetamine hydrochloride (Didrex), bladderwrack (focus vesiculosus), BRS3 (bombesin receptor subtype 3) agonists, bupropion, caffeine, CCK agonists, chitosan, chromium, conjugated linoleic acid, corticotropin-releasing hormone agonists, dehydroepiandrosterone, DGAT1 (diacylglycerol acyltransferase 1) inhibitors, DGAT2 (diacylglycerol acyltransferase 2) inhibitors, dicarboxylate transporter inhibitors, ephedra, exendin-4 (an inhibitor of glp-1) FAS (fatty acid synthase) inhibitors (such as Cerulenin and C75), fat resorption inhibitors (such as those in WO03/053451, and the like), fatty acid transporter inhibitors, natural water soluble fibers (such as psyllium, plantago, guar, oat, pectin), galanin antagonists, galega (Goat's Rue, French Lilac), garcinia cambogia, germander (teucrium chamaedrys), ghrelin antibodies and ghrelin antagonists (such as those disclosed in WO01/87335, and WO02/08250), peptide hormones and variants thereof which affect the islet cell secretion, such as the hormones of the secretin/gastric inhibitory peptide (GIP)/vasoactive intestinal peptide (VIP)/pituitary adenylate cyclase activating peptide (PACAP)/glucagon-like peptide II (GLP-II)/glicentin/glucagon gene family and/or those of the adrenomedullin/amylin/calcitonin gene related peptide (CGRP) gene family including GLP-1 (glucagon-like peptide 1) agonists (e.g. (1) exendin-4, (2) those GLP-1 molecules described in US20050130891 including GLP-1(7-34), GLP-1(7-35), GLP-1(7-36) or GLP-1(7-37) in its C-terminally carboxylated or amidated form or as modified GLP-1 peptides and modifications thereof including those described in paragraphs 17-44 of US20050130891, and derivatives derived from GLP-1-(7-34)COOH and the corresponding acid amide are employed which have the following general formula:

R-NH-HAEGTFTSDVSYLEGQAAKEFIAWLVK-CONH₂ (SEQ ID NO:4853)

wherein R═H or an organic compound having from 1 to 10 carbon atoms. Preferably, R is the residue of a carboxylic acid. Particularly preferred are the following carboxylic acid residues: formyl, acetyl, propionyl, isopropionyl, methyl, ethyl, propyl, isopropyl, n-butyl, sec-butyl, tert-butyl.) and glp-1 (glucagon-like peptide-1), glucocorticoid antagonists, glucose transporter inhibitors, growth hormone secretagogues (such as those disclosed and specifically described in U.S. Pat. No. 5,536,716), interleukin-6 (IL-6) and modulators thereof (as in WO03/057237, and the like), L-carnitine, Mc3r (melanocortin 3 receptor) agonists, MCH2R (melanin concentrating hormone 2R) agonist/antagonists, melanin concentrating hormone antagonists, melanocortin agonists (such as Melanotan II or those described in WO 99/64002 and WO 00/74679), nomame herba, phosphate transporter inhibitors, phytopharm compound 57 (CP 644,673), pyruvate, SCD-1 (stearoyl-CoA desaturase-1) inhibitors, T71 (Tularik, Inc., Boulder Colo.), Topiramate (Topimax®, indicated as an anti-convulsant which has been shown to increase weight loss), transcription factor modulators (such as those disclosed in WO03/026576), β-hydroxy steroid dehydrogenase-1 inhibitors (β-HSD-1), β-hydroxy-β-methylbutyrate, p57 (Pfizer), Zonisamide (Zonegran™, indicated as an anti-epileptic which has been shown to lead to weight loss), and the agents disclosed in US20030119428 paragraphs 20-26.
The guanylin potentiating agents described herein can be used in therapeutic combination with one or more anti-diabetic agents, including but not limited to:
PPARγ agonists such as glitazones (e.g., WAY-120,744, AD 5075, balaglitazone, ciglitazone, darglitazone (CP-86325, Pfizer), englitazone (CP-68722, Pfizer), isaglitazone (MIT/J&J), MCC-555 (Mitsibishi disclosed in U.S. Pat. No. 5,594,016), pioglitazone (such as such as Actos™ pioglitazone; Takeda), rosiglitazone (Avandia™; Smith Kline Beecham), rosiglitazone maleate, troglitazone (Rezulin®, disclosed in U.S. Pat. No. 4,572,912), rivoglitazone (CS-011, Sankyo), GL-262570 (Glaxo Welcome), BRL49653 (disclosed in WO98/05331), CLX-0921, 5-BTZD, GW-0207, LG-100641, JJT-501 (JPNT/P&U), L-895645 (Merck), R-119702 (Sankyo/Pfizer), NN-2344 (Dr. Reddy/NN), YM-440 (Yamanouchi), LY-300512, LY-519818, R483 (Roche), T131 (Tularik), and the like and compounds disclosed in U.S. Pat. No. 4,687,777, U.S. Pat. No. 5,002,953, U.S. Pat. No. 5,741,803, U.S. Pat. No. 5,965,584, U.S. Pat. No. 6,150,383, U.S. Pat. No. 6,150,384, U.S. Pat. No. 6,166,042, U.S. Pat. No. 6,166,043, U.S. Pat. No. 6,172,090, U.S. Pat. No. 6,211,205, U.S. Pat. No. 6,271,243, U.S. Pat. No. 6,288,095, U.S. Pat. No. 6,303,640, U.S. Pat. No. 6,329,404, U.S. Pat. No. 5,994,554, WO97/10813, WO97/27857, WO97/28115, WO97/28137, WO97/27847, WO00/76488, WO03/000685, WO03/027112, WO03/035602, WO03/048130, WO03/055867, and pharmaceutically acceptable salts thereof;
biguanides such as metformin hydrochloride (N,N-dimethylimidodicarbonimidic diamide hydrochloride, such as Glucophage™, Bristol-Myers Squibb); metformin hydrochloride with glyburide, such as Glucovance™, Bristol-Myers Squibb); buformin (Imidodicarbonimidic diamide, N-butyl-); etoformine (1-Butyl-2-ethylbiguanide, Schering A. G.); other metformin salt forms (including where the salt is chosen from the group of, acetate, benzoate, citrate, ftimarate, embonate, chlorophenoxyacetate, glycolate, palmoate, aspartate, methanesulphonate, maleate, parachlorophenoxyisobutyrate, formate, lactate, succinate, sulphate, tartrate, cyclohexanecarboxylate, hexanoate, octanoate, decanoate, hexadecanoate, octodecanoate, benzenesulphonate, trimethoxybenzoate, paratoluenesulphonate, adamantanecarboxylate, glycoxylate, glutamate, pyrrolidonecarboxylate, naphthalenesulphonate, 1-glucosephosphate, nitrate, sulphite, dithionate and phosphate), and phenformin;
protein tyrosine phosphatase-1B (PTP-1B) inhibitors, such as A-401,674, KR 61639, OC-060062, OC-83839, OC-297962, MC52445, MC52453, ISIS 113715, and those disclosed in WO99/585521, WO99/58518, WO99/58522, WO99/61435, WO03/032916, WO03/032982, WO03/041729, WO03/055883, WO02/26707, WO02/26743, JP2002114768, and pharmaceutically acceptable salts and esters thereof;
sulfonylureas such as acetohexamide (e.g. Dymelor, Eli Lilly), carbutamide, chlorpropamide (e.g. Diabinese®, Pfizer), gliamilide (Pfizer), gliclazide (e.g. Diamcron, Servier Canada Inc), glimepiride (e.g. disclosed in U.S. Pat. No. 4,379,785, such as Amaryl™, Aventis), glipentide, glipizide (e.g. Glucotrol or Glucotrol XL Extended Release, Pfizer), gliquidone, glisolamide, glyburide/glibenclamide (e.g. Micronase or Glynase Prestab, Pharmacia & Upjohn and Diabeta, Aventis), tolazamide (e.g. Tolinase), and tolbutamide (e.g. Orinase), and pharmaceutically acceptable salts and esters thereof;
meglitinides such as repaglinide (e.g. Pranidin®, Novo Nordisk), KAD1229 (PF/Kissei), and nateglinide (e.g. Starlix®, Novartis), and pharmaceutically acceptable salts and esters thereof;
α glucoside hydrolase inhibitors (or glucoside inhibitors) such as acarbose (e.g. Precose™, Bayer disclosed in U.S. Pat. No. 4,904,769), miglitol (such as GLYSET™, Pharmacia & Upjohn disclosed in U.S. Pat. No. 4,639,436), camiglibose (Methyl 6-deoxy-6-[(2R,3R,4R,5S)-3,4,5-trihydroxy-2-(hydroxymethyl)piperidino]-alpha-D-glucopyranoside, Marion Merrell Dow), voglibose (Takeda), adiposine, emiglitate, pradimicin-Q, salbostatin, CKD-711, MDL-25,637, MDL-73,945, and MOR 14, and the compounds disclosed in U.S. Pat. No. 4,062,950, U.S. Pat. No. 4,174,439, U.S. Pat. No. 4,254,256, U.S. Pat. No. 4,701,559, U.S. Pat. No. 4,639,436, U.S. Pat. No. 5,192,772, U.S. Pat. No. 4,634,765, U.S. Pat. No. 5,157,116, U.S. Pat. No. 5,504,078, U.S. Pat. No. 5,091,418, U.S. Pat. No. 5,217,877, U.S. Pat. No. 5,109,1 and WO01/47528 (polyamines);
α-amylase inhibitors such as tendamistat, trestatin, and A1-3688, and the compounds disclosed in U.S. Pat. No. 4,451,455, U.S. Pat. No. 4,623,714, and U.S. Pat. No. 4,273,765;
SGLT2 inhibitors including those disclosed in U.S. Pat. No. 6,414,126 and U.S. Pat. No. 6,515,117;
an aP2 inhibitor such as disclosed in U.S. Pat. No. 6,548,529;
insulin secreatagogues such as linogliride, A-4166, forskilin, dibutyrl cAMP, isobutylmethylxanthine (IBMX), and pharmaceutically acceptable salts and esters thereof;
fatty acid oxidation inhibitors, such as clomoxir, and etomoxir, and pharmaceutically acceptable salts and esters thereof;
A2 antagonists, such as midaglizole, isaglidole, deriglidole, idazoxan, earoxan, and fluparoxan, and pharmaceutically acceptable salts and esters thereof,
insulin and related compounds (e.g. insulin mimetics) such as biota, LP-100, novarapid, insulin detemir, insulin lispro, insulin glargine, insulin zinc suspension (lente and ultralente), Lys-Pro insulin, GLP-1 (1-36) amide, GLP-1 (73-7) (insulintropin, disclosed in U.S. Pat. No. 5,614,492), LY-315902 (Lilly), GLP-1 (7-36)-NH2), AL-401 (AutoImmune), certain compositions as disclosed in U.S. Pat. No. 4,579,730, U.S. Pat. No. 4,849,405, U.S. Pat. No. 4,963,526, U.S. Pat. No. 5,642,868, U.S. Pat. No. 5,763,396, U.S. Pat. No. 5,824,638, U.S. Pat. No. 5,843,866, U.S. Pat. No. 6,153,632, U.S. Pat. No. 6,191,105, and WO 85/05029, and primate, rodent, or rabbit insulin including biologically active variants thereof including allelic variants, more preferably human insulin available in recombinant form (sources of human insulin include pharmaceutically acceptable and sterile formulations such as those available from Eli Lilly (Indianapolis, Ind. 46285) as Humulin™ (human insulin rDNA origin), also see the THE PHYSICIAN'S DESK REFERENCE, 55.sup.th Ed. (2001) Medical Economics, Thomson Healthcare (disclosing other suitable human insulins);
non-thiazolidinediones such as JT-501 and farglitazar (GW-2570/GI-262579), and pharmaceutically acceptable salts and esters thereof;
PPARα/γ dual agonists such as AR-HO39242 (Aztrazeneca), GW-409544 (Glaxo-Wellcome), BVT-142, CLX-0940, GW-1536, GW-1929, GW-2433, KRP-297 (Kyorin Merck; 5-[(2,4-Dioxo thiazolidinyl)methyl]methoxy-N-[[4-(trifluoromethyl)phenyl]methyl]benzamide), L-796449, LR-90, MK-0767 (Merck/Kyorin/Banyu), SB 219994, muraglitazar (BMS), tesaglitzar (Astrazeneca), reglitazar (JTT-501) and those disclosed in WO99/16758, WO99/19313, WO99/20614, WO99/38850, WO00/23415, WO00/23417, WO00/23445, WO00/50414, WO01/00579, WO01/79150, WO02/062799, WO03/004458, WO03/016265, WO03/018010, WO03/033481, WO03/033450, WO03/033453, WO03/043985, WO 031053976, U.S. application Ser. No. 09/664,598, filed Sep. 18, 2000, Murakami et al. Diabetes 47, 1841-1847 (1998), and pharmaceutically acceptable salts and esters thereof;
other insulin sensitizing drugs;
VPAC2 receptor agonists;
GLK modulators, such as those disclosed in WO03/015774;
retinoid modulators such as those disclosed in WO03/000249;
GSK 3β/GSK 3 inhibitors such as 4-[2-(2-bromophenyl)-4-(4-fluorophenyl-1H-imidazol-5-yl]pyridine and those compounds disclosed in WO03/024447, WO03/037869, WO03/037877, WO03/037891, WO03/068773, EP1295884, EP1295885, and the like; glycogen phosphorylase (HGLPa) inhibitors such as CP-368,296, CP-316,819, BAYR3401, and compounds disclosed in WO01/94300, WO02/20530, WO03/037864, and pharmaceutically acceptable salts or esters thereof;
ATP consumption promotors such as those disclosed in WO03/007990;
TRB3 inhibitors;
vanilloid receptor ligands such as those disclosed in WO03/049702;
hypoglycemic agents such as those disclosed in WO03/015781 and WO03/040114;
glycogen synthase kinase 3 inhibitors such as those disclosed in WO03/035663 agents such as those disclosed in WO99/51225, US20030134890, WO01/24786, and WO03/059870;
insulin-responsive DNA binding protein-1 (IRDBP-1) as disclosed in WO03/057827, and the like;
adenosine A2 antagonists such as those disclosed in WO03/035639, WO03/035640, and the like;
PPARδ agonists such as GW 501516, GW 590735, and compounds disclosed in JP10237049 and WO02/14291;
dipeptidyl peptidase IV (DP-IV) inhibitors, such as isoleucine thiazolidide, NVP-DPP728A (1-[[[2-[(5-cyanopyridin-2-yl)amino]ethyl]amino]acetyl]-2-cyano-(S)-pyrrolidine, disclosed by Hughes et al, Biochemistry, 38(36), 11597-11603, 1999), P32/98, NVP-LAF-237, P3298, TSL225 (tryptophyl-1,2,3,4-tetrahydro-isoquinoline-3-carboxylic acid, disclosed by Yamada et al, Bioorg. & Med. Chem. Lett. 8 (1998) 1537-1540), valine pyrrolidide, TMC-2A/2B/2C, CD-26 inhibitors, FE999011, P9310/K364, VIP 0177, DPP4, SDZ 274-444, 2-cyanopyrrolidides and 4-cyanopyrrolidides as disclosed by Ashworth et al, Bioorg. & Med. Chem. Lett., Vol. 6, No. 22, pp 1163-1166 and 2745-2748 (1996), and the compounds disclosed in U.S. Pat. No. 6,395,767, U.S. Pat. No. 6,573,287, U.S. Pat. No. 6,395,767 (compounds disclosed include BMS-477118, BMS-471211 and BMS 538,305), WO99/38501, WO99/46272, WO99/67279, WO99/67278, WO99/61431 WO03/004498, WO03/004496, EP 1258476, WO02/083128, WO02/062764, WO03/000250, WO03/002530, WO03/002531, WO03/002553, WO03/002593, WO03/000180, and WO03/000181;
GLP-1 agonists such as exendin-3 and exendin-4 (including the 39 aa peptide synthetic exendin-4 called Exenatide®), and compounds disclosed in US2003087821 and NZ 504256, and pharmaceutically acceptable salts and esters thereof;
peptides including amlintide and Symlin® (pramlintide acetate); and glycokinase activators such as those disclosed in US2002103199 (fused heteroaromatic compounds) and WO02/48106 (isoindolin-1-one-substituted propionamide compounds).

[0486] The guanylin potentiating agents described herein useful in the treatment of obesity can be administered as a cotherapy with electrostimulation (US20040015201).

[0487] The guanylin potentiating agents described herein can be used in combination therapy with agents that activate soluble guanylate cyclase, for example those described in US20040192680.

[0488] The guanylin potentiating agents described herein can be used in combination therapy with a phosphodiesterase inhibitor. PDE inhibitors are those compounds which slow the degradation of cyclic AMP (cAMP) and/or cyclic GMP (cGMP) by inhibition of the phosphodiesterases, which can lead to a relative increase in the intracellular concentration of cAMP and/or cGMP. Possible PDE inhibitors are primarily those substances which are to be numbered among the class consisting of the PDE3 inhibitors, the class consisting of the PDE4 inhibitors and/or the class consisting of the PDE5 inhibitors, in particular those substances which can be designated as mixed types of PDE3/4 inhibitors or as mixed types of PDE3/4/5 inhibitors. By way of example, those PDE inhibitors may be mentioned such as are described and/or claimed in the following patent applications and patents: DE1470341, DE2108438, DE2123328, DE2305339, DE2305575, DE2315801, DE2402908, DE2413935, DE2451417, DE2459090, DE2646469, DE2727481, DE2825048, DE2837161, DE2845220, DE2847621, DE2934747, DE3021792, DE3038166, DE3044568, EP000718, EP0008408, EP0010759, EP0059948, EP0075436, EP0096517, EP0112987, EP0116948, EP0150937, EP0158380, EP0161632, EP0161918, EP0167121, EP0199127, EP0220044, EP0247725, EP0258191, EP0272910, EP0272914, EP0294647, EP0300726, EP0335386, EP0357788, EP0389282, EP0406958, EP0426180, EP0428302, EP0435811, EP0470805, EP0482208, EP0490823, EP0506194, EP0511865, EP0527117, EP0626939, EP0664289, EP0671389, EP0685474, EP0685475, EP0685479, JP92234389, JP94329652, JP95010875, U.S. Pat. Nos. 4,963,561, 5,141,931, WO9117991, WO9200968, WO9212961, WO9307146, WO9315044, WO9315045, WO9318024, WO9319068, WO9319720, WO9319747, WO9319749, WO9319751, WO9325517, WO9402465, WO9406423, WO9412461, WO9420455, WO9422852, WO9425437, WO9427947, WO9500516, WO9501980, WO9503794, WO9504045, WO9504046, WO9505386, WO9508534, WO9509623, WO9509624, WO9509627, WO9509836, WO9514667, WO9514680, WO9514681, WO9517392, WO9517399, WO9519362, WO9522520, WO9524381, WO9527692, WO9528926, WO9535281, WO9535282, WO9600218, WO9601825, WO9602541, WO9611917, DE3142982, DE1116676, DE2162096, EP0293063, EP0463756, EP0482208, EP0579496, EP0667345 U.S. Pat. No. 6,331,543, US20050004222 (including those disclosed in formulas I-XIII and paragraphs 37-39, 85-0545 and 557-577) and WO9307124, EP0163965, EP0393500, EP0510562, EP0553174, WO9501338 and WO9603399. PDE5 inhibitors which may be mentioned by way of example are RX-RA-69, SCH-51866, KT-734, vesnarinone, zaprinast, SKF-96231, ER-21355, BF/GP-385, NM-702 and sildenafil (Viagra®). PDE4 inhibitors which may be mentioned by way of example are RO-20-1724, MEM 1414 (R1533/R1500; Pharmacia Roche), DENBUFYLLINE, ROLIPRAM, OXAGRELATE, NITRAQUAZONE, Y-590, DH-6471, SKF-94120, MOTAPIZONE, LIXAZINONE, INDOLIDAN, OLPRINONE, ATIZORAM, KS-506-G, DIPAMFYLLINE, BMY-43351, ATIZORAM, AROFYLLINE, FILAMINAST, PDB-093, UCB-29646, CDP-840, SKF-107806, PICLAMILAST, RS-17597, RS-25344-000, SB-207499, TIBENELAST, SB-210667, SB-211572, SB-211600, SB-212066, SB-212179, GW-3600, CDP-840, MOPIDAMOL, ANAGRELIDE, IBUDILAST, AMRINONE, PIMOBENDAN, CILOSTAZOL, QUAZINONE and N-(3,5-dichloropyrid-4-yl)-3-cyclopropylmethoxy4-difluoromethoxybenzamide. PDE3 inhibitors which may be mentioned by way of example are SULMAZOLE, AMPIZONE, CILOSTAMIDE, CARBAZERAN, PIROXIMONE, IMAZODAN, CI-930, SIGUAZODAN, ADIBENDAN, SATERINONE, SKF-95654, SDZ-MKS-492, 349-U-85, EMORADAN, EMD-53998, EMD-57033, NSP-306, NSP-307, REVIZINONE, NM-702, WIN-62582 and WIN-63291, ENOXIMONE and MILRINONE. PDE3/4 inhibitors which may be mentioned by way of example are BENAFENTRINE, TREQUINSIN, ORG-30029, ZARDAVERINE, L-686398, SDZ-ISQ-844, ORG-20241, EMD-54622, and TOLAFENTRINE. Other PDE inhibitors include: cilomilast, pentoxifylline, roflumilast, tadalafil (Clalis®), theophylline, and vardenafil (Levitra®), zaprinast (PDE5 specific).

The guanylin potentiating agents described herein can be used in combination therapy (for example, in order to decrease or inhibit uterine contractions) with a tocolytic agent including but not limited to beta-adrenergic agents, magnesium sulfate, prostaglandin inhibitors, and calcium channel blockers.
The guanylin potentiating agents of the invention can be used in combination therapy with an anti-neoplastic agents including but not limited to alkylating agents, epipodophyllotoxins, nitrosoureas, antimetabolites, vinca alkaloids, anthracycline antibiotics, nitrogen mustard agents, and the like. Particular anti-neoplastic agents may include tamoxifen, taxol, etoposide and 5-fluorouracil. The peptides and agonists of the invention can be used in combination therapy (for example as in a chemotherapeutic composition) with an antiviral and monoclonal antibody therapies.
The guanylin potentiating agents of the invention can be used in combination therapy (for example, in prevention/treatment of congestive heart failure or another method described herein) with the partial agonist of the nociceptin receptor ORL1 described by Dooley et al. (The Journal of Pharmacology and Experimental Therapeutics, 283 (2): 735-741, 1997). The agonist is a hexapeptide having the amino acid sequence Ac-RYY (RK) (WI) (RK)-NH2 (SEQ ID NO:4835) (“the Dooley peptide”), where the brackets show allowable variation of amino acid residue. Thus Dooley peptide can include but are not limited to KYYRWR (SEQ ID NO:4836), RYYRWR (SEQ ID NO:4837), KWRYYR (SEQ ID NO:4838), RYYRWK (SEQ ID NO:4839), RYYRWK (all-D amin acids), RYYRIK (SEQ ID NO:4840), RYYRIR (SEQ ID NO:4831), RYYKIK (SEQ ID NO:4842), RYYKIR (SEQ ID NO:4843), RYYKWR (SEQ ID NO:4844), RYYKWK (SEQ ID NO:4845), RYYRWR (SEQ ID NO:4846), RYYRWK (SEQ ID NO:4847), RYYRIK (SEQ ID NO:4848), RYYKWR (SEQ ID NO:4849), RYYKWK (SEQ ID NO:4850), RYYRWK (SEQ ID NO:4851) and KYYRWK (SEQ ID NO:4852), wherein the amino acid residues are in the L-form unless otherwise specified. The peptides and agonists of the invention can *also be used in combination therapy with peptide conjugate modifications of the Dooley peptide described in WO0198324.

### Methods of Treatment

[0489] Guanylin potentiating agents can be used to treat conditions in which it would be useful to potentiate the action of guanylin whether the guanylin is endogenous or is administered exogenously.

[0490] The guanylin potentiating agents described herein can be used alone or in combination therapy for the treatment or prevention of congestive heart failure. Such agents can be used in combination with natriuretic peptides (e.g., atrial natriuretic peptide, brain natriuretic peptide or C-type natriuretic peptide), a diuretic, or an inhibitor of angiotensin converting enzyme.

[0491] The guanylin potentiating agents described herein can be used alone or in combination therapy for the treatment or prevention of benign prostatic hyperplasia (BPH). Such agents can be used in combination with one or more agents for treatment of BPH, for example, a 5-alpha reductase inhibitor (e.g., finasteride) or an alpha adrenergic inhibitor (e.g., doxazosine).

[0492] The guanylin potentiating agents described herein can be used alone or in combination therapy for the treatment, prevention or reduction of visceral pain associated with a gastrointestinal disorder or pain associated with another disorder.

[0493] The guanylin potentiating agents described herein can be used alone or in combination therapy for the treatment or prevention of obesity-related disorders (e.g. disorders that are associated with, caused by, or result from obesity). Examples of obesity-related disorders include overeating and bulimia, hypertension, diabetes, elevated plasma insulin concentrations and insulin resistance, dyslipidemias, hyperlipidemia, endometrial, breast, prostate and colon cancer, osteoarthritis, obstructive sleep apnea, cholelithiasis, gallstones, heart disease, abnormal heart rhythms and arrhythmias, myocardial infarction, congestive heart failure, coronary heart disease, sudden death, stroke, polycystic ovarian disease, craniopharyngioma, the Prader-Willi Syndrome, Frohlich's syndrome, GH-deficient subjects, normal variant short stature, Turner's syndrome, and other pathological conditions showing reduced metabolic activity or a decrease in resting energy expenditure as a percentage of total fat-free mass, e.g., children with acute lymphoblastic leukemia. The agents may be used to reduce or control body weight (or fat) or to prevent and/or treat obesity or other appetite related disorders related to the excess consumption of food, ethanol and other appetizing substances. The agents may be used to modulate lipid metabolism, reduce body fat (e.g. via increasing fat utilization) or reduce (or suppress) appetite (e.g. via inducing satiety). Further examples of obesity-related disorders are metabolic syndrome, also known as syndrome X, insulin resistance syndrome, sexual and reproductive dysfunction, such as infertility, hypogonadism in males and hirsutism in females, gastrointestinal motility disorders, such as obesity-related gastroesophageal reflux, respiratory disorders, such as obesity-hypoventilation syndrome (Pickwickian syndrome), cardiovascular disorders, inflammation, such as systemic inflammation of the vasculature, arteriosclerosis, hypercholesterolemia, hyperuricaemia, lower back pain, gallbladder disease, gout, and kidney cancer. The agents are also useful for reducing the risk of secondary outcomes of obesity, such as reducing the risk of left ventricular hypertrophy.

[0494] The guanylin potentiating agents described herein can be used alone or in combination therapy for the treatment or prevention of gastrointestinal related disorders including: chronic intestinal pseudo-obstruction (Ogilvie's syndrome), colonic pseudoobstruction, Crohn's disease, dyspepsia (including functional dyspepsia or nonulcer dyspepsia), duodenogastric reflux, functional bowel disorder, functional gastrointestinal disorders, functional heartburn, gastroesophageal reflux disease (GERD), gastrointestinal motility disorders, gastroparesis (e.g. idopathic gastroparesis), hypertrophic pyloric stenosis, Inflammatory bowel disease, irritable bowel syndrome (IBS), post-operative ileus, and ulcerative colitis. The guanylin potentiating agents described herein can be used alone or in combination therapy to patient suffering from or susceptible to GI disorders relating to damage to the GI tract stemming from impact or surgical intervention. The guanylin potentiating agents described herein can be used alone or in combination therapy to patients at risk for or having particular diseases associated with hypomotility or stasis in the GI tract. For example, diabetic neuropathy, anorexia nervosa, and achlorhydria are frequently accompanied by gastric hypomotility. Damage to the GI tract following surgical intervention, for instance, can result in substantial gastric stasis. The guanylin potentiating agents described herein can be administered alone or in combination therapy to patients susceptible to or having a GI disorder associated with diabetes (e.g. diabetic gastropathy). The guanylin potentiating agents described herein can be used alone or in combination therapy to prevent and/or treat GI disorders characterized by at least one of nausea, vomiting, heartburn, postprandial discomfort, diarrhea, constipation, indigestion or related symptoms. guanylin potentiating agents described herein can be used alone or in combination therapy to prevent and/or treat GI disorders associated with at least one of diabetes, anorexia nervosa, bulimia, achlorhydria, achalasia, anal fissure, irritable bowel syndrome, intestinal pseudoobstruction, scleroderma and gastrointestinal damage.

The guanylin potentiating agents described herein can be used to prevent and/or treat constipation. Constipation can be used to describe bowel patterns which include one or more of hard, small, infrequent stools; the sensation of difficulty in passing stool, specifically excessive or ineffectual straining; the sensation of incomplete evacuation. Constipation has also been described as the passage of stool less than a certain number (e.g. 3) of times per week. A number of conditions can be associated with constipation. Constipation can be associated with numerous disorders and conditions. For example, constipation can be (1) associated with the use of a therapeutic agent (e.g. antihypertensives, anticonvulsants, antispasmodics, analgesics, anticholinergics, antidepressants, antipsychotics, cation-containing agents, anticonvulsants, ganglion blockers, vinca alkaloids); (2) associated with a muscular, neuropathic, metabolic or endocrine disorder (including but not limited to myotonic dystrophy, dermamyositis, systemic sclerosis, sclerodoma, amyloidosis (neurologic or muscular), ischemia, tumor of the central nervous system, autonomic neuropathy, Chagas disease, cystic fibrosis, diabetes mellitus, Hirschsprung disease, hyperthyroidism, hypocalcaemia, hypothyroidism, Multiple Sclerosis, neurofibromatosis, Parkinson's disease, and spinal cord lesions (for example, related to sacral nerve damage related to trauma or a tumor or the enteric nervous system)); (3) post-surgical constipation (postoperative ileus); (4) associated with a structural colon alteration (for example that associated with Neoplasm, stricture, volvulus, anorectal, inflammation, prolapse, rectocele, or fissure); (5) associated with the a gastrointestinal disorder; (6) associated with a systemic illness or disorder (for example, electrolyte abnormalities, thyroid disease, diabetes mellitus, panhypopituitarism, Addison's disease, pheochromocytoma, uremia, porphyria); (7) chronic constipation; (8) associated with the use of analgesic drugs (e.g. opioid induced constipation); (9) associated with megacolon; and (10) idiopathic constipation (functional constipation). Functional constipation can be associated with normal transit, slow transit (e.g. one or fewer bowel movements per week) and pelvic floor dyssynergia. Pelvic floor dyssynergia is considered a disorder of the rectum and anus although these patients also have abnormal contractions throughout the colon. Patients with pelvic floor dyssynergia have abnormal colonic pressure waves prior to defecation and present with symptoms that may include a sensation of incomplete evacuation, excessive straining, a need for digital disimpaction, perianal heaviness, and tenesmus. Constipation can be associated with bloating and abdominal pain. The guanylin potentiating agents of the invention can be used to prevent and/or treat low stool frequency or poor stool consistency.

[0495] The guanylin potentiating agents described herein can be used to treat decreased intestinal motility, slow digestion or slow stomach emptying. The guanylin potentiating agents described herein can be used to relieve one or more symptoms of IBS (bloating, pain, constipation), GERD (acid reflux into the esophagus), duodenogastric reflux, functional dyspepsia, or gastroparesis (nausea, vomiting, bloating, delayed gastric emptying) and other disorders described herein. The guanylin potentiating agents of the invention can be used to treat flatulence.

[0496] The guanylin potentiating agents described herein can be used to increase intestinal motility and to prevent and/or treat gastrointestinal immotility and other conditions calling for laxative or stool softener therapy. Gastrointestinal immotility can include constipation, and also includes delayed oral cecal transit time, irregular taxation, and other related gastrointestinal motility disfunction including impaction. Impaction is a condition where a large mass of dry, hard stool develops in the rectum, often due to chronic constipation. This mass may be so hard that it cannot be excreted. The subjects affected by constipation or gastrointestinal immotility can be refractory to laxative therapy and/or stool softener therapy.

[0497] The guanylin potentiating agents described herein can be used for the treatment or prevention of cancer, pre-cancerous growths, or metastatic growths. For example, they can be used for the prevention or treatment of: colorectal/local metastasized colorectal cancer, intestinal polyps, gastrointestinal tract cancer, lung cancer, cancer or pre-cancerous growths or metastatic growths of epithelial cells, polyps, breast, colorectal, lung, ovarian, pancreatic, prostatic, renal, stomach, bladder, liver, esophageal and testicular carcinoma, carcinoma (e.g., basal cell, basosquamous, Brown-Pearce, ductal carcinoma, Ehrlich tumor, Krebs, Merkel cell, small or non-small cell lung, oat cell, papillary, bronchiolar, squamous cell, transitional cell, (Walker), leukemia (e.g., B-cell, T-cell, HTLV, acute or chronic lymphocytic, mast cell, myeloid), histiocytonia, histiocytosis, Hodgkin's disease, non-Hodgkin's lymphoma, plasmacytoma, reticuloendotheliosis, adenoma, adeno-carcinoma, adenofibroma, adenolymphoma, ameloblastoma, angiokeratoma, angiolymphoid hyperplasia with eosinophilia, sclerosing angioma, angiomatosis, apudoma, branchionia, malignant carcinoid syndrome, carcinoid heart disease, carcinosarcoma, cementoma, cholangioma, cholesteatoma, chondrosarcoma, chondroblastoma, chondrosarcoma, chordoma, choristoma, craniopharyngioma, chrondrorna, cylindroma, cystadenocarcinoma, cystadenoma, cystosarconia phyllodes, dysgenninoma, ependymoma, Ewing sarcoma, fibroma, fibrosarcoma, giant cell tumor, ganglioneuroma, glioblastoma, glomangioma, granulosa cell tumor, gynandroblastoma, hamartoma, hemangioendothelioma, hemangioma, hemangio-pericytoma, hemangiosarcoma, hepatoma, islet cell tumor, Kaposi sarcoma, leiomyoma, leiomyosarcoma, leukosarcoma, Leydig cell tumor, lipoma, liposarcoma, lymphaugioma, lymphangiomyoma, lymphangiosarcoma, medulloblastoma, meningioma, mesenchymoma, mesonephroma, mesothelioma, myoblastoma, myoma, myosarcoma, myxoma, myxosarcoma, neurilemmoma, neuroma, neuroblastoma, neuroepithelioma, neurofibroma, neurofibromatosis, odontoma, osteoma, osteosarcoma, papilloma, paraganglioma, paraganglionia. nonchroinaffin, pinealoma, rhabdomyoma, rhabdomyosarcoma, Sertoli cell tumor, teratoma, theca cell tumor, and other diseases in which cells have become dysplastic, immortalized, or transformed.

[0498] The guanylin potentiating agents described herein can be used for the treatment or prevention of: Familial Adenomatous Polyposis (FAP) (autosomal dominant syndrome) that precedes colon cancer, hereditary nonpolyposis colorectal cancer (HNPCC), and inherited autosomal dominant syndrome.

[0499] For treatment or prevention of cancer, pre-cancerous growths and metastatic growths, the guanylin potentiating agents described herein can be used in combination therapy with radiation or chemotherapeutic agents, an inhibitor of a cGMP-dependent phosphodiesterase or a selective cyclooxygenase-2 inhibitor. A number of selective cyclooxygenase-2 inhibitors are described in US20010024664, U.S. Pat. No. 5,380,738, U.S. Pat. No. 5,344,991, U.S. Pat. No. 5,393,790, U.S. Pat. No. 5,434,178, U.S. Pat. No. 5,474,995, U.S. Pat. No. 5,510,368, WO02/062369, WO 96/06840, WO 96/03388, WO 96/03387, WO 96/19469, WO 96/25405, WO 95/15316, WO 94/15932, WO 94/27980, WO 95/00501, WO 94/13635, WO 94/20480, and WO 94/26731, the disclosures of which are herein incorporated by reference. [Pyrazol-1-yl]benzenesulfonamides have also been described as inhibitors of cyclooxygenase-2.

The guanylin potentiating agents described herein can be used in the treatment or prevention of inflammation. Thus, they can be used alone or in combination with an inhibitor of cGMP-dependent phosphodiesterase or a selective cyclooxygenase-2 inhibitor for treatment of: organ inflammation, IBD (e.g, Crohn's disease, ulcerative colitis), asthma, nephritis, hepatitis, pancreatitis, bronchitis, cystic fibrosis, ischemic bowel diseases, intestinal inflammations/allergies, coeliac disease, proctitis, eosnophilic gastroenteritis, mastocytosis, and other inflammatory disorders. The guanylin potentiating agents described herein can be used alone or in combination therapy in the treatment or prevention of gastrointestinal tract inflammation (e.g. inflammation associated with a gastrointestinal disorder, gastrointestinal tract infection, or another disorder). They can be used alone or in combination therapy with phenoxyalkycarboxylic acid derivatives for the treatment of interstitial cystitis, irritable bowel syndrome, ulcerative colitis, and other inflammatory conditions, as mentioned in US20050239902A1.

[0500] The guanylin potentiating agents described herein can also be used to treat or prevent insulin-related disorders, for example: II diabetes mellitus, hyperglycemia, obesity, disorders associated with disturbances in glucose or electrolyte transport and insulin secretion in cells, or endocrine disorders. They can be also used in insulin resistance treatment and post-surgical and non-post surgery decrease in insulin responsiveness.

[0501] The guanylin potentiating agents described herein can be used to prevent and/or treat pulmonary and respiratory related disorders, including, inhalation, ventilation and mucus secretion disorders, pulmonary hypertension, chronic obstruction of vessels and airways, and irreversible obstructions of vessels and bronchi. One may administer an agent for treating bronchospasm, for inducing bronchodilation, for treating chronic obstructive pulmonary disease (including chronic bronchitis with normal airflow), for treating asthma (including bronchial asthma, intrinsic asthma, extrinsic asthma, chronic or inveterate asthma (e.g. late asthma and airways hyper-responsiveness), dust-induced asthma, allergen-induced asthma, viral-induced asthma, cold-induced asthma, pollution-induced asthma and exercise-induced asthma) and for treating rhinitis (including acute-, allergic, hatrophic rhinitis or chronic rhinitis (such as rhinitis caseosa, hypertrophic rhinitis, rhinitis purulenta, rhinitis sicca), rhinitis medicamentosa, membranous rhinitis (including croupous, fibrinous and pseudomembranous rhinitis), scrofulous rhinitis, perennial allergic rhinitis, seasonal rhinitis (including rhinitis nervosa (hay fever) and vasomotor rhinitis). The guanylin potentiating agents described herein may also be useful in the treatment of dry eye disease and chronic sinusitis. The guanylin potentiating agents described herein may also be used to prevent and/or treat disorders characterized by acute pulmonary vasoconstriction such as may result from pneumonia, traumatic injury, aspiration or inhalation injury, fat embolism in the lung, acidosis inflammation of the lung, adult respiratory distress syndrome, acute pulmonary edema, acute mountain sickness, post-cardiac surgery, acute pulmonary hypertension, persistent pulmonary hypertension of the newborn, perinatal aspiration syndrome, hyaline membrane disease, acute pulmonary thromboembolism, herapin-protamine reactions, sepsis, status asthmaticus or hypoxia (including iatrogenic hypoxia) and other forms of reversible pulmonary vasoconstriction. Such pulmonary disorders are also characterized by inflammation of the lung including those associated with the migration into the lung of nonresident cell types including the various leucocyte subclasses. Also included in the respiratory disorders contemplated are: bullous disease, cough, chronic cough associated with inflammation or iatrogenic induced, airway constriction, pigeon fancier's disease, eosinophilic bronchitis, asthmatic bronchitis, chronic bronchitis with airway obstruction (chronic obstructive bronchitis), eosinophilic lung disease, emphysema, farmer's lung, allergic eye diseases (including allergic conjunctivitis, vernal conjunctivitis, vernal keratoconjunctivitis, and giant papillary conjunctivitis), idiopathic pulmonary fibrosis, cystic fibrosis, diffuse pan bronchiolitis and other diseases which are characterized by inflammation of the lung and/or excess mucosal secretion. Other physiological events which are contemplated to be prevented, treated or controlled include platelet activation in the lung, chronic inflammatory diseases of the lung which result in interstitial fibrosis, such as interstitial lung diseases (ILD) (e.g., idiopathic pulmonary fibrosis, or ILD associated with rheumatoid arthritis, or other autoimmune conditions), chronic obstructive pulmonary disease (COPD)(such as irreversible COPD), chronic sinusitis, fibroid lung, hypersensitivity lung diseases, hypersensitivity pneumonitis, idiopathic interstitial pneumonia, nasal congestion, nasal polyposis, and otitis media.

[0502] The guanylin potentiating agents described herein can be used alone or in combitherapy to prevent or treat: retinopathy, nephropathy, diabetic angiopathy, and edema formation.

[0503] The guanylin potentiating agents described herein can be used alone or in combitherapy to prevent or treat neurological disorders, for example, headache, migraines, anxiety, stress, cognitive disorders, cerebral ischemia, brain trauma, movement disorders, aggression, psychosis, seizures, panic attacks, hysteria, sleep disorders, depression, schizoaffective disorders, sleep apnea, attention deficit syndromes, memory loss, dementia, memory and learning disorders as discussed in Moncada and Higgs 1995 FASEB J. 9:1319-1330; Severina 1998 Biochemistry 63:794; Lee et al. 2000 PNAS 97: 10763-10768; Hobbs 1997 TIPS 18:484-491; Murad 1994 Adv. Pharmacol. 26:1-335; and Denninger et al. 1999 Biochim. Biophys. Acta 1411:334-350 and narcolepsy. They may also be used as a sedative.

[0504] The guanylin potentiating agents described herein can be used in combination with GC-C agonists including detectably labeled GC-C agonists as markers to identify, detect, stage, or diagnosis diseases and conditions of small intestine, including, without limitation: Crohn's disease, colitis, inflammatory bowel disease, tumors, benign tumors, such as benign stromal tumors, adenoma, angioma, adenomatous (pedunculated and sessile) polyps, malignant, carcinoid tumors, endocrine cell tumors, lymphoma, adenocarcinoma, foregut, midgut, and hindgut carcinoma, gastroinstestinal stromal tumor (GIST), such as leiomyorna, cellular leiomyoma, leiomyoblastoma, and leiomyosarcoma, gastrointestinal autonomic nerve tumor, malabsorption syndromes, celiac diseases, diverticulosis, Meckel's diverticulum, colonic diverticula, megacolon, Hirschsprung's disease, irritable bowel syndrome, mesenteric ischemia, ischemic colitis, colorectal cancer, colonic polyposis, polyp syndrome, intestinal adenocarcinoma, Liddle syndrome, Brody myopathy, infantile convulsions, and choreoathetosis.

[0505] The guanylin potentiating agents described herein can used in combination with GC-C agonists conjugated to another molecule (e.g., a diagnostic or therapeutic molecule) to target cells bearing the GC-C receptor, e.g., cystic fibrosis lesions and specific cells lining the intestinal tract. Thus, they can be used to target radioactive moieties or therapeutic moieties to the intestine to aid in imaging and diagnosing or treating colorectal/metastasized or local colorectal cancer and to deliver normal copies of the p53 tumor suppressor gene to the intestinal tract.

[0506] The guanylin potentiating agents described herein can also be used to increase the number of GC-C molecules on the surface of a cell. In some embodiments the cell is a metastasized colorectal cancer cell. In one embodiment the GC-C agonist is therapeutically conjugated to a second agent. In certain embodiments, the second agent can be radioactive or radiostable. In certain embodiments the second agent can be selected from the group consisting of a compound that causes cell death, a compound that inhibits cell division, a compound that induces cell differentiation, a chemotherapeutic, a toxin and a radiosensitizing agent. In certain embodiments the second agent can be selected from the group consisting of: methotrexate, doxorubicin, daunorubicin, cytosinarabinoside, etoposide, 5-4 fluorouracil, melphalan, chlorambucil, cis-platin, vindesine, mitomycin, bleomycin, purothionin, macromomycin, 1,4-benzoquinone derivatives, trenimon, ricin, ricin A chain, Pseudomonas exotoxin, diphtheria toxin, Clostridium perfringens phospholipase C, bovine pancreatic ribonuclease, pokeweed antiviral protein, abrin, abrin A chain, cobra venom factor, gelonin, saporin, modeccin, viscumin, volkensin, nitroimidazole, metronidazole and misonidazole. In certain embodiments the second agent can be a cytoxic agent selected from the group consisting of cemadotin, a derivative of cemadotin, a derivative of hemiasterlin, esperamicin C, neocarzinostatin, maytansinoid DM1, 7-chloromethyl-10,11 methylenedioxy-camptothecin, rhizoxin, and the halichondrin B analog, ER-086526.

[0507] The guanylin potentiating agents described herein can be used alone or in combination therapy to prevent and/or treat inner ear disorders, e.g., to prevent and/or treat Meniere's disease (including symptoms thereof such as vertigo, hearing loss, tinnitus, sensation of fullness in the ear), Mal de debarquement syndrome, otitis extema, otitis media, otorrhea, acute mastoiditis, otosclerosis, otic pain, otic bleeding, otic inflammation, Lermoyez's syndrome, vestibular neuronitis, benign paroxysmal positional vertigo (BPPV), herpes zoster oticus, Ramsay Hunt's syndrome, herpes, labyrinthitis, purulent labyrinthitis, perilymph fistulas, presbycusis, ototoxicity (including drug-induced ototoxicity), neuromias (including acoustic neuromas), aerotitis media, infectious myringitis, bullous myringitis, squamous cell carcinoma, basal cell carcinoma, pre-cancerous otic conditions, nonchromaffin paragangliomas, chemodectomas, glomus jugulare tumors, glomus tympanicum tumors, perichondritis, aural eczematoid dermatitis, malignant external otitis, subperichondrial hematoma, ceruminomas, impacted cerumen, sebaceous cysts, osteomas, keloids, otalgia, tinnitus, tympanic membrane infection, tympanitis, otic furuncles, petrositis, conductive and sensorineural hearing loss, epidural abscess, lateral sinus thrombosis, subdural empyema, otitic hydrocephalus, Dandy's syndrome, bullous myringitis, diffuse external otitis, foreign bodies, keratosis obturans, otic neoplasm, otomycosis, trauma, acute barotitis media, acute eustachian tube obstruction, postsurgical otalgia, cholesteatoma, infections related to an otic surgical procedure, and complications associated with any of said disorders. The agents described herein can be used alone or in combination therapy to maintain fluid homeostasis in the inner ear and to prevent or treat neuronitis (including viral neuronitis), ganglionitis, and geniculate.

[0508] The guanylin potentiating agents described herein can be used alone or in combination therapy to prevent and/or treat disorders associated with fluid and sodium retention, e.g., diseases of the electrolyte-water/electrolyte transport system within the kidney, gut and urogenital system, congestive heart failure, hypertension, hypotension, salt dependent forms of high blood pressure, hepatic edema, and liver cirrhosis. In addition they can be used to facilitate diuresis or control intestinal fluid. Guanylin potentiating agents described herein can also be used to treat disorders where there is abnormal proliferation of epithelial cells within the kidney (e.g. as in the case of renal cancer). The guanylin potentiating agents described herein can be used alone or in combination therapy to prevent and/or treat kidney disease. “Kidney disease” includes renal failure (including acute renal failure), renal insufficiency, nephrotic edema, glomerulonephritis, pyelonephritis, kidney failure, chronic renal failure, nephritis, nephrosis, azotemia, uremia, immune renal disease, acute nephritic syndrome, rapidly progressive nephritic syndrome, nephrotic syndrome, Berger's Disease, chronic nephritic/proteinuric syndrome, tubulointerstital disease, nephrotoxic disorders, renal infarction, atheroembolic renal disease, renal cortical necrosis, malignant nephroangiosclerosis, renal vein thrombosis, renal tubular acidosis, renal glucosuria, nephrogenic diabetes insipidus, Bartter's Syndrome, Liddle's Syndrome, polycystic kidney disease, medullary cystic disease, medullary sponge kidney, hereditary nephritis, and nail-patella syndrome, along with any disease or disorder that relates to the renal system and related disorders, as well as symptoms indicative of, or related to, renal or kidney disease and related disorders.

[0509] The guanylin potentiating agents described herein can be used alone or in combination therapy to prevent or treat polycystic kidney disease. Polycystic kidney disease “PKD” (also called “polycystic renal disease”) refers to a group of disorders characterized by a large number of cysts distributed throughout dramatically enlarged kidneys. The resultant cyst development leads to impairment of kidney function and can eventually cause kidney failure. “PKD” specifically includes autosomal dominant polycystic kidney disease (ADPKD) and recessive autosomal recessive polycystic kidney disease (ARPKD), in all stages of development, regardless of the underlying cause.

[0510] The guanylin potentiating agents described herein can be used alone or in combination therapy to prevent and/or treat disorders associated with bicarbonate secretion, e.g., Cystic Fibrosis.

[0511] The guanylin potentiating agents described herein can be used alone or in combination therapy to prevent and/or treat disorders associated with bile secretion. In addition, they can be used to facilitate or control chloride and bile fluid secretion in the gall bladder.

[0512] The guanylin potentiating agents described herein can be used alone or in combination therapy to prevent and/or treat disorders associated with liver cell regeneration. This may include administration of the peptides and agonists to liver transplant recipients and to patients with drug or alcohol induced-liver damage. Furthermore, agents may be useful to treat liver damage as in the case of viral mediated hepatitis. The guanylin potentiating agents described herein may be used alone or in combination to prevent and/or treat liver abscess, liver cancer (either primary or metastatic), cirrhosis (such as cirrhosis caused by the alcohol consumption or primary biliary cirrhosis), amebic liver abscess, autoimmune hepatitis, biliary atresia, coccidioidomycosis disseminated, δ agent (hepatitis δ), hemochromatosis, hepatitis a, hepatitis b, hepatitis c, or any other acute, subacute, fulminant or chronic hepatitis of viral, metabolic or toxic etiology, hepatocellular carcinoma, pyogenic liver abscess, Reye's syndrome, sclerosing cholangitis, Wilson's disease, drug induced hepatotoxicity, or fulminant or acute liver failure. The agents described herein may be used in stimulating hepatic regeneration after surgical hepatectomy.

[0513] The guanylin potentiating agents described herein can be used alone or in combination therapy to prevent and/or treat myocardial infraction, diastolic dysfunction, angina pectoris, stable, unstable and variant (Prinzmetal) angina, atherosclerosis, thrombosis, endothelial dysfunction, cardiac edema, stroke, conditions of reduced blood vessel patency, e.g., postpercutaneous transluminal coronary angioplasty (post-PTCA) and peripheral vascular disease.

[0514] The guanylin potentiating agents described herein can be used alone or in combination therapy to prevent and/or treat glaucoma. The guanylin potentiating agents described herein can be used alone or in combination therapy to prevent and/or treat immunodeficiency. The guanylin potentiating agents described herein can be used alone or in combination therapy to prevent and/or treat bladder outlet obstruction and incontinence.

[0515] The guanylin potentiating agents described herein can be used alone or in combination therapy to prevent and/or treat male (e.g. erectile dysfunction) or female sexual dysfunction, premature labor, dysmenorrhoea, endometriosis, polycystic ovary syndrome, vaginal dryness, uterine pain, or pelvic pain. These guanylin potentiating agents of the invention can be utilized as tocolytic agents that decrease or arrest uterine contractions. The guanylin potentiating agents of the invention can be used to prevent/treat premature/preterm labor. Premature or preterm labor can be associated with, for example, an illness/disorder/condition of the mother (such as pre-eclampsia, high blood pressure or diabetes, abnormal shape or size of the uterus, weak or short cervix, hormone imbalance, vaginal infection that spreads to the uterus, abnormalities of the placenta, such as placenta previa, and excessive amniotic fluid), premature rupture of the amniotic membranes (“water breaks”), large fetus, and more than one fetus. The guanylin potentiating agents of the invention can be used to prevent uterine rupture. The guanylin potentiating agents of the invention can be used treat rapid uterine contractions (for example, associated with placental abruption wherein the placental abruption is associated with hypertension, diabetes, a multiply pregnancy, an unusually large amount of amniotic fluid, numerous previous deliveries, or advanced maternal age (e.g. >40 years old). In certain embodiments they can be used in combination with a phosphodiesterase inhibitor. The guanylin potentiating agents of the invention can be used alone or in combination therapy to prevent and/or treat infertility, for example, male infertility due to poor sperm quality, decreased sperm motility or low sperm count.

[0516] The guanylin potentiating agents described herein can be used alone or in combination therapy to prevent and/or treat osteopenia disorders (bone loss disorders). “Bone loss disorders” include conditions and diseases wherein the inhibition of bone loss and/or the promotion of bone formation is desirable. Among such conditions and diseases are osteoporosis, osteomyelitis, Paget's disease (osteitis deformans), periodontitis, hypercalcemia, osteonecrosis, osteosarcoma, osteolyic metastases, familial expansile osteolysis, prosthetic loosening, periprostetic osteolysis, bone loss attendant rheumatoid arthritis, and cleiodocranial dysplasia (CCD). Osteoporosis includes primary osteoporosis, endocrine osteoporosis (hyperthyroidism, hyperparathyroidism, Cushing's syndrome, and acromegaly), hereditary and congenital forms of osteoporosis (osteogenesis imperfecta, homocystinuria, Menkes' syndrome, and Rile-Day syndrome) and osteoporosis due to immobilization of extremitiesosteomyelitis, or an infectious lesion in bone leading to bone loss. The agents can be used alone or in combination therapy to stimulating bone regeneration. The bone regeneration may be following reconstruction of bone defects in cranio-maxillofacial surgery, or following an implant into bone, for example a dental implant, bone supporting implant, or prosthesis. The bone regeneration may also be following a bone fracture.

[0517] The guanylin potentiating agents of the invention may be used alone or in combination therapy (for example, with other agents that increase cGMP) to prevent or treat disorders related to an alteration in cGMP including, but not limited to Alzheimer's disease, psoriasis, skin necrosis, scarring, fibrosis, baldness, Kawasaki's Disease, nutcracker oesophagus (US20050245544), septic shock, NSAID-induced gastric disease or disorder, ischemic renal disease or disorder, peptic ulcer, sickle cell anemia, epilepsy, and a neuroinflammatory disease or disorder (for example as described in WO05105765).

The application's sequence listing, which the Patent Office published only in electronic form, follows.

SEQUENCE LISTING (4853 sequences)

SEQ ID NO: 1 - protein, 16 aa, Artificial Sequence
  Synthetically generated peptide
  VARIANT 1: Xaa = Ser, Asn, Tyr, Ala, Gln, Pro, Lys, Gly, or Thr
  VARIANT 2: Xaa =  His, Asp, Glu, Ala, Ser, Asn, or Gly
  VARIANT 3: Xaa = Thr, Asp, Ser, Glu, Pro, Val or Leu
  VARIANT 5: Xaa = Asp, Ile or Glu
  VARIANT 6: Xaa = Ile, Trp or Leu
  VARIANT 7: Xaa = Cys, Ser, or Tyr
  VARIANT 8: Xaa = Ala, Val, Thr, Ile, or Met
  VARIANT 9: Xaa = any amino acid; or Phe, Tyr, Asn, Trp; or an amino acid other than Phe, Trp, or Tyr; or non-aromatic amino acid
  VARIANT 10: Xaa = Ala, Val, Met, Thr or Ile
  VARIANT 11: Xaa = Ala or Val
  VARIANT 13: Xaa = Ala or Thr
  VARIANT 14: Xaa = Gly, Ala or Ser
  VARIANT 15: Xaa = Cys, or Tyr
  VARIANT 16: Xaa = any amino acid; or His, Leu or Ser
XXXCXXXXXXXCXXXX

SEQ ID NO: 2 - protein, 491 aa, Homo sapiens
MALLWGLLVLSWSCLQGPCSVFSPVSAMEPLGRQLTSGPNQEQVSPLTLLKLGNQEPGGQTALKSPPGVCSRDPTPEQTHRLARAMMAFTADLFSLVAQTSTCPNLILSPLSVALALSHLALGAQNHTLQRLQQVLHAGSGPCLPHLLSRLCQDLGPGAFRLAARMYLQKGFPIKEDFLEQSEQLFGAKPVSLTGKQEDDLANINQWVKEATEGKIQEFLSGLPEDTVLLLLNAIHFQGFWRNKFDPSLTQRDSFHLDEQFTVPVEMMQARTYPLRWFLLEQPEIQVAHFPFKNNMSFVVLVPTHFEWNVSQVLANLSWDTLHPPLVWERPTKVRLPKLYLKHQMDLVATLSQLGLQELFQAPDLRGISEQSLVVSGVQHQSTLELSEVGVEAAAATSIAMSRMSLSSFSVNRPFLFFIFEDTTGLPLFVGSVRNPNPSAPRELKEQQDSPGNKDFLQSLKGFPRGDKLFGPDLKLVPPMEEDYPQFGSPK

SEQ ID NO: 3 - protein, 29 aa, Hirudinaria manillensis
  VARIANT 23: Xaa = any amino acid
VDEKAEVTDGLCGDWTCSGAQVXQNDAAV

SEQ ID NO: 4 - protein, 55 aa, Hirudo medicinalis
TQGNTCGGETCSAAQVCLKGKCVCNEVHCRIRCKYGLKKDENGCEYPCSCAKASQ

SEQ ID NO: 5 - protein, 70 aa, Hirudo medicinalis [sequence omitted]

SEQ ID NO: 6 - protein, 20 aa, Bombyx mori
DEPTTKPFCEQAFGDCGTPY

SEQ ID NO: 7 - protein, 20 aa, Bombyx mori
DKPTTEPFICEQRFGNCGTG

SEQ ID NO: 8 - protein, 66 aa, Unknown
  Synthetically generated peptide
ITYTDCTESGQNLCLCEGSNVCGKGNKCILGSQGKDNQCVTGEGTPKPQSHNQGDFEPIPEDAYDE

SEQ ID NO: 9 - protein, 20 aa, Artificial Sequence
  Hirudin variant
FPRPGGGGNGDFEEIPEEYL

SEQ ID NO: 10 - protein, 100 aa, Artificial Sequence
  Synthetically generated peptide
MKMSRLCLSVALLVLLGTLAASTPGCDTSNQAKAQRPDFCLEPPYTGPCKARIIRYFYNAKAGLCQTFVYGGCRAKRNNFKSAEDCMRTCGGAIGPWENL

SEQ ID NO: 11 - protein, 5 aa, Artificial Sequence
  Synthetically generated peptide
QHNPR

SEQ ID NO: 12 - protein, 6 aa, Artificial Sequence
  Synthetically generated peptide
VQHNPR

SEQ ID NO: 13 - protein, 7 aa, Artificial Sequence
  Synthetically generated peptide
VRQHNPR

SEQ ID NO: 14 - protein, 8 aa, Artificial Sequence
  Synthetically generated peptide
VRGQHNPR

SEQ ID NO: 15 - protein, 9 aa, Artificial Sequence
  Synthetically generated peptide
VRGPQHNPR

SEQ ID NO: 16 - protein, 10 aa, Artificial Sequence
  Synthetically generated peptide
VRGPRQHNPR

SEQ ID NO: 17 - protein, 11 aa, Artificial Sequence
  Synthetically generated peptide
VRGPRRQHNPR

SEQ ID NO: 18 - protein, 6 aa, Artificial Sequence
  Synthetically generated peptide
RQHNPR

SEQ ID NO: 19 - protein, 34 aa, Artificial Sequence
  Synthetically generated peptide
IKPEAPGEDASPEELNRYYASLRHYLNLVTRQRY

SEQ ID NO: 20 - protein, 16 aa, Homo Sapiens
PGTCGEICAYAACTGC

SEQ ID NO: 21 - protein, 15 aa, Artificial Sequence
  Synthetically generated peptide
GTCGEICAYAACTGC

SEQ ID NO: 22 - protein, 14 aa, Artificial Sequence
  Synthetically generated peptide
TCGEICAYAACTGC

SEQ ID NO: 23 - protein, 13 aa, Artificial Sequence
  Synthetically generated peptide
CGEICAYAACTGC

SEQ ID NO: 24 - protein, 12 aa, Artificial Sequence
  Synthetically generated peptide
CEICAYAACTGC

SEQ ID NO: 25 - protein, 12 aa, Artificial Sequence
  Synthetically generated peptide
CGICAYAACTGC

SEQ ID NO: 26 - protein, 12 aa, Artificial Sequence
  Synthetically generated peptide
CGECAYAACTGC

SEQ ID NO: 27 - protein, 12 aa, Artificial Sequence
  Synthetically generated peptide
CGEICYAACTGC

SEQ ID NO: 28 - protein, 12 aa, Artificial Sequence
  Synthetically generated peptide
CGEICAAACTGC

SEQ ID NO: 29 - protein, 12 aa, Artificial Sequence
  Synthetically generated peptide
CGEICAYACTGC

SEQ ID NO: 30 - protein, 12 aa, Artificial Sequence
  Synthetically generated peptide
CGEICAYACTGC

SEQ ID NO: 31 - protein, 12 aa, Artificial Sequence
  Synthetically generated peptide
CGEICAYAACGC

SEQ ID NO: 32 - protein, 12 aa, Artificial Sequence
  Synthetically generated peptide
CGEICAYAACTC

SEQ ID NO: 33 - protein, 13 aa, Artificial Sequence
  Synthetically generated peptide
TCEICAYAACTGC

SEQ ID NO: 34 - protein, 12 aa, Artificial Sequence
  Synthetically generated peptide
TCICAYAACTGC

SEQ ID NO: 35 - protein, 12 aa, Artificial Sequence
  Synthetically generated peptide
TCECAYAACTGC

SEQ ID NO: 36 - protein, 12 aa, Artificial Sequence
  Synthetically generated peptide
TCEICYAACTGC

SEQ ID NO: 37 - protein, 12 aa, Artificial Sequence
  Synthetically generated peptide
TCEICAAACTGC

SEQ ID NO: 38 - protein, 12 aa, Artificial Sequence
  Synthetically generated peptide
TCEICAYACTGC

SEQ ID NO: 39 - protein, 12 aa, Artificial Sequence
  Synthetically generated peptide
TCEICAYACTGC

SEQ ID NO: 40 - protein, 12 aa, Artificial Sequence
  Synthetically generated peptide
TCEICAYAACGC

SEQ ID NO: 41 - protein, 12 aa, Artificial Sequence
  Synthetically generated peptide
TCEICAYAACTC

SEQ ID NO: 42 - protein, 13 aa, Artificial Sequence
  Synthetically generated peptide
TCGICAYAACTGC

SEQ ID NO: 43 - protein, 12 aa, Artificial Sequence
  Synthetically generated peptide
TCGCAYAACTGC

SEQ ID NO: 44 - protein, 12 aa, Artificial Sequence
  Synthetically generated peptide
TCGICYAACTGC

SEQ ID NO: 45 - protein, 12 aa, Artificial Sequence
  Synthetically generated peptide
TCGICAAACTGC

SEQ ID NO: 46 - protein, 12 aa, Artificial Sequence
  Synthetically generated peptide
TCGICAYACTGC

SEQ ID NO: 47 - protein, 12 aa, Artificial Sequence
  Synthetically generated peptide
TCGICAYACTGC

SEQ ID NO: 48 - protein, 12 aa, Artificial Sequence
  Synthetically generated peptide
TCGICAYAACGC

SEQ ID NO: 49 - protein, 12 aa, Artificial Sequence
  Synthetically generated peptide
TCGICAYAACTC

SEQ ID NO: 50 - protein, 13 aa, Artificial Sequence
  Synthetically generated peptide
TCGECAYAACTGC

SEQ ID NO: 51 - protein, 12 aa, Artificial Sequence
  Synthetically generated peptide
TCGECYAACTGC

SEQ ID NO: 52 - protein, 12 aa, Artificial Sequence
  Synthetically generated peptide
TCGECAAACTGC

SEQ ID NO: 53 - protein, 12 aa, Artificial Sequence
  Synthetically generated peptide
TCGECAYACTGC

SEQ ID NO: 54 - protein, 12 aa, Artificial Sequence
  Synthetically generated peptide
TCGECAYACTGC

SEQ ID NO: 55 - protein, 12 aa, Artificial Sequence
  Synthetically generated peptide
TCGECAYAACGC

SEQ ID NO: 56 - protein, 12 aa, Artificial Sequence
  Synthetically generated peptide
TCGECAYAACTC

SEQ ID NO: 57 - protein, 13 aa, Artificial Sequence
  Synthetically generated peptide
TCGEICYAACTGC

SEQ ID NO: 58 - protein, 12 aa, Artificial Sequence
  Synthetically generated peptide
TCGEICAACTGC

SEQ ID NO: 59 - protein, 12 aa, Artificial Sequence
  Synthetically generated peptide
TCGEICYACTGC

SEQ ID NO: 60 - protein, 12 aa, Artificial Sequence
  Synthetically generated peptide
TCGEICYACTGC

SEQ ID NO: 61 - protein, 12 aa, Artificial Sequence
  Synthetically generated peptide
TCGEICYAACGC

SEQ ID NO: 62 - protein, 12 aa, Artificial Sequence
  Synthetically generated peptide
TCGEICYAACTC

SEQ ID NO: 63 - protein, 13 aa, Artificial Sequence
  Synthetically generated peptide
TCGEICAAACTGC

SEQ ID NO: 64 - protein, 12 aa, Artificial Sequence
  Synthetically generated peptide
TCGEICAACTGC

SEQ ID NO: 65 - protein, 12 aa, Artificial Sequence
  Synthetically generated peptide
TCGEICAACTGC

SEQ ID NO: 66 - protein, 12 aa, Artificial Sequence
  Synthetically generated peptide
TCGEICAAACGC

SEQ ID NO: 67 - protein, 12 aa, Artificial Sequence
  Synthetically generated peptide
TCGEICAAACTC

SEQ ID NO: 68 - protein, 13 aa, Artificial Sequence
  Synthetically generated peptide
TCGEICAYACTGC

SEQ ID NO: 69 - protein, 12 aa, Artificial Sequence
  Synthetically generated peptide
TCGEICAYCTGC

SEQ ID NO: 70 - protein, 12 aa, Artificial Sequence
  Synthetically generated peptide
TCGEICAYACGC

SEQ ID NO: 71 - protein, 12 aa, Artificial Sequence
  Synthetically generated peptide
TCGEICAYACTC

SEQ ID NO: 72 - protein, 13 aa, Artificial Sequence
  Synthetically generated peptide
TCGEICAYACTGC

SEQ ID NO: 73 - protein, 12 aa, Artificial Sequence
  Synthetically generated peptide
TCGEICAYACGC

SEQ ID NO: 74 - protein, 12 aa, Artificial Sequence
  Synthetically generated peptide
TCGEICAYACTC

SEQ ID NO: 75 - protein, 13 aa, Artificial Sequence
  Synthetically generated peptide
TCGEICAYAACGC

SEQ ID NO: 76 - protein, 12 aa, Artificial Sequence
  Synthetically generated peptide
TCGEICAYAACC

SEQ ID NO: 77 - protein, 13 aa, Artificial Sequence
  Synthetically generated peptide
TCGEICAYAACTC

SEQ ID NO: 78 - protein, 14 aa, Artificial Sequence
  Synthetically generated peptide
GCGEICAYAACTGC

SEQ ID NO: 79 - protein, 13 aa, Artificial Sequence
  Synthetically generated peptide
GCEICAYAACTGC

SEQ ID NO: 80 - protein, 12 aa, Artificial Sequence
  Synthetically generated peptide
GCICAYAACTGC

SEQ ID NO: 81 - protein, 12 aa, Artificial Sequence
  Synthetically generated peptide
GCECAYAACTGC

SEQ ID NO: 82 - protein, 12 aa, Artificial Sequence
  Synthetically generated peptide
GCEICYAACTGC

SEQ ID NO: 83 - protein, 12 aa, Artificial Sequence
  Synthetically generated peptide
GCEICAAACTGC

SEQ ID NO: 84 - protein, 12 aa, Artificial Sequence
  Synthetically generated peptide
GCEICAYACTGC

SEQ ID NO: 85 - protein, 12 aa, Artificial Sequence
  Synthetically generated peptide
GCEICAYACTGC

SEQ ID NO: 86 - protein, 12 aa, Artificial Sequence
  Synthetically generated peptide
GCEICAYAACGC

SEQ ID NO: 87 - protein, 12 aa, Artificial Sequence
  Synthetically generated peptide
GCEICAYAACTC

SEQ ID NO: 88 - protein, 13 aa, Artificial Sequence
  Synthetically generated peptide
GCGICAYAACTGC

SEQ ID NO: 89 - protein, 12 aa, Artificial Sequence
  Synthetically generated peptide
GCGCAYAACTGC

SEQ ID NO: 90 - protein, 12 aa, Artificial Sequence
  Synthetically generated peptide
GCGICYAACTGC

SEQ ID NO: 91 - protein, 12 aa, Artificial Sequence
  Synthetically generated peptide
GCGICAAACTGC

SEQ ID NO: 92 - protein, 12 aa, Artificial Sequence
  Synthetically generated peptide
GCGICAYACTGC

SEQ ID NO: 93 - protein, 12 aa, Artificial Sequence
  Synthetically generated peptide
GCGICAYACTGC

SEQ ID NO: 94 - protein, 12 aa, Artificial Sequence
  Synthetically generated peptide
GCGICAYAACGC

SEQ ID NO: 95 - protein, 12 aa, Artificial Sequence
  Synthetically generated peptide
GCGICAYAACTC

SEQ ID NO: 96 - protein, 13 aa, Artificial Sequence
  Synthetically generated peptide
GCGECAYAACTGC

SEQ ID NO: 97 - protein, 12 aa, Artificial Sequence
  Synthetically generated peptide
GCGECYAACTGC

SEQ ID NO: 98 - protein, 12 aa, Artificial Sequence
  Synthetically generated peptide
GCGECAAACTGC

SEQ ID NO: 99 - protein, 12 aa, Artificial Sequence
  Synthetically generated peptide
GCGECAYACTGC

SEQ ID NO: 100 - protein, 12 aa, Artificial Sequence
  Synthetically generated peptide
GCGECAYACTGC

SEQ ID NO: 101 - protein, 12 aa, Artificial Sequence
  Synthetically generated peptide
GCGECAYAACGC

SEQ ID NO: 102 - protein, 12 aa, Artificial Sequence
  Synthetically generated peptide
GCGECAYAACTC

SEQ ID NO: 103 - protein, 13 aa, Artificial Sequence
  Synthetically generated peptide
GCGEICYAACTGC

SEQ ID NO: 104 - protein, 12 aa, Artificial Sequence
  Synthetically generated peptide
GCGEICAACTGC

SEQ ID NO: 105 - protein, 12 aa, Artificial Sequence
  Synthetically generated peptide
GCGEICYACTGC

SEQ ID NO: 106 - protein, 12 aa, Artificial Sequence
  Synthetically generated peptide
GCGEICYACTGC

SEQ ID NO: 107 - protein, 12 aa, Artificial Sequence
  Synthetically generated peptide
GCGEICYAACGC

SEQ ID NO: 108 - protein, 12 aa, Artificial Sequence
  Synthetically generated peptide
GCGEICYAACTC

SEQ ID NO: 109 - protein, 13 aa, Artificial Sequence
  Synthetically generated peptide
GCGEICAAACTGC

SEQ ID NO: 110 - protein, 12 aa, Artificial Sequence
  Synthetically generated peptide
GCGEICAACTGC

SEQ ID NO: 111 - protein, 12 aa, Artificial Sequence
  Synthetically generated peptide
GCGEICAACTGC

SEQ ID NO: 112 - protein, 12 aa, Artificial Sequence
  Synthetically generated peptide
GCGEICAAACGC

SEQ ID NO: 113 - protein, 12 aa, Artificial Sequence
  Synthetically generated peptide
GCGEICAAACTC

SEQ ID NO: 114 - protein, 13 aa, Artificial Sequence
  Synthetically generated peptide
GCGEICAYACTGC

SEQ ID NO: 115 - protein, 12 aa, Artificial Sequence
  Synthetically generated peptide
GCGEICAYCTGC

SEQ ID NO: 116 - protein, 12 aa, Artificial Sequence
  Synthetically generated peptide
GCGEICAYACGC

SEQ ID NO: 117 - protein, 12 aa, Artificial Sequence
  Synthetically generated peptide
GCGEICAYACTC

SEQ ID NO: 118 - protein, 13 aa, Artificial Sequence
  Synthetically generated peptide
GCGEICAYACTGC

SEQ ID NO: 119 - protein, 12 aa, Artificial Sequence
  Synthetically generated peptide
GCGEICAYACGC

SEQ ID NO: 120 - protein, 12 aa, Artificial Sequence
  Synthetically generated peptide
GCGEICAYACTC

SEQ ID NO: 121 - protein, 13 aa, Artificial Sequence
  Synthetically generated peptide
GCGEICAYAACGC

SEQ ID NO: 122 - protein, 12 aa, Artificial Sequence
  Synthetically generated peptide
GCGEICAYAACC

SEQ ID NO: 123 - protein, 13 aa, Artificial Sequence
  Synthetically generated peptide
GCGEICAYAACTC

SEQ ID NO: 124 - protein, 14 aa, Artificial Sequence
  Synthetically generated peptide
GTCEICAYAACTGC

SEQ ID NO: 125 - protein, 13 aa, Artificial Sequence
  Synthetically generated peptide
GTCICAYAACTGC

SEQ ID NO: 126 - protein, 12 aa, Artificial Sequence
  Synthetically generated peptide
GTCCAYAACTGC

SEQ ID NO: 127 - protein, 12 aa, Artificial Sequence
  Synthetically generated peptide
GTCICYAACTGC

SEQ ID NO: 128 - protein, 12 aa, Artificial Sequence
  Synthetically generated peptide
GTCICAAACTGC

SEQ ID NO: 129 - protein, 12 aa, Artificial Sequence
  Synthetically generated peptide
GTCICAYACTGC

SEQ ID NO: 130 - protein, 12 aa, Artificial Sequence
  Synthetically generated peptide
GTCICAYACTGC

SEQ ID NO: 131 - protein, 12 aa, Artificial Sequence
  Synthetically generated peptide
GTCICAYAACGC

SEQ ID NO: 132 - protein, 12 aa, Artificial Sequence
  Synthetically generated peptide
GTCICAYAACTC

SEQ ID NO: 133 - protein, 13 aa, Artificial Sequence
  Synthetically generated peptide
GTCECAYAACTGC

SEQ ID NO: 134 - protein, 12 aa, Artificial Sequence
  Synthetically generated peptide
GTCECYAACTGC

SEQ ID NO: 135 - protein, 12 aa, Artificial Sequence
  Synthetically generated peptide
GTCECAAACTGC

SEQ ID NO: 136 - protein, 12 aa, Artificial Sequence
  Synthetically generated peptide
GTCECAYACTGC

SEQ ID NO: 137 - protein, 12 aa, Artificial Sequence
  Synthetically generated peptide
GTCECAYACTGC

SEQ ID NO: 138 - protein, 12 aa, Artificial Sequence
  Synthetically generated peptide
GTCECAYAACGC

SEQ ID NO: 139 - protein, 12 aa, Artificial Sequence
  Synthetically generated peptide
GTCECAYAACTC

SEQ ID NO: 140 - protein, 13 aa, Artificial Sequence
  Synthetically generated peptide
GTCEICYAACTGC

SEQ ID NO: 141 - protein, 12 aa, Artificial Sequence
  Synthetically generated peptide
GTCEICAACTGC

SEQ ID NO: 142 - protein, 12 aa, Artificial Sequence
  Synthetically generated peptide
GTCEICYACTGC

SEQ ID NO: 143 - protein, 12 aa, Artificial Sequence
  Synthetically generated peptide
GTCEICYACTGC

SEQ ID NO: 144 - protein, 12 aa, Artificial Sequence
  Synthetically generated peptide
GTCEICYAACGC

SEQ ID NO: 145 - protein, 12 aa, Artificial Sequence
  Synthetically generated peptide
GTCEICYAACTC

SEQ ID NO: 146 - protein, 13 aa, Artificial Sequence
  Synthetically generated peptide
GTCEICAAACTGC

SEQ ID NO: 147 - protein, 12 aa, Artificial Sequence
  Synthetically generated peptide
GTCEICAACTGC

SEQ ID NO: 148 - protein, 12 aa, Artificial Sequence
  Synthetically generated peptide
GTCEICAACTGC

SEQ ID NO: 149 - protein, 12 aa, Artificial Sequence
  Synthetically generated peptide
GTCEICAAACGC

SEQ ID NO: 150 - protein, 12 aa, Artificial Sequence
  Synthetically generated peptide
GTCEICAAACTC

SEQ ID NO: 151 - protein, 13 aa, Artificial Sequence
  Synthetically generated peptide
GTCEICAYACTGC

SEQ ID NO: 152 - protein, 12 aa, Artificial Sequence
  Synthetically generated peptide
GTCEICAYCTGC

SEQ ID NO: 153 - protein, 12 aa, Artificial Sequence
  Synthetically generated peptide
GTCEICAYACGC

SEQ ID NO: 154 - protein, 12 aa, Artificial Sequence
  Synthetically generated peptide
GTCEICAYACTC

SEQ ID NO: 155 - protein, 13 aa, Artificial Sequence
  Synthetically generated peptide
GTCEICAYACTGC

SEQ ID NO: 156 - protein, 12 aa, Artificial Sequence
  Synthetically generated peptide
GTCEICAYACGC

SEQ ID NO: 157 - protein, 12 aa, Artificial Sequence
  Synthetically generated peptide
GTCEICAYACTC

SEQ ID NO: 158 - protein, 13 aa, Artificial Sequence
  Synthetically generated peptide
GTCEICAYAACGC

SEQ ID NO: 159 - protein, 12 aa, Artificial Sequence
  Synthetically generated peptide
GTCEICAYAACC

SEQ ID NO: 160 - protein, 13 aa, Artificial Sequence
  Synthetically generated peptide
GTCEICAYAACTC

SEQ ID NO: 161 - protein, 14 aa, Artificial Sequence
  Synthetically generated peptide
GTCGICAYAACTGC

SEQ ID NO: 162 - protein, 13 aa, Artificial Sequence
  Synthetically generated peptide
GTCGCAYAACTGC

SEQ ID NO: 163 - protein, 12 aa, Artificial Sequence
  Synthetically generated peptide
GTCGCYAACTGC

SEQ ID NO: 164 - protein, 12 aa, Artificial Sequence
  Synthetically generated peptide
GTCGCAAACTGC

SEQ ID NO: 165 - protein, 12 aa, Artificial Sequence
  Synthetically generated peptide
GTCGCAYACTGC

SEQ ID NO: 166 - protein, 12 aa, Artificial Sequence
  Synthetically generated peptide
GTCGCAYACTGC

SEQ ID NO: 167 - protein, 12 aa, Artificial Sequence
  Synthetically generated peptide
GTCGCAYAACGC

SEQ ID NO: 168 - protein, 12 aa, Artificial Sequence
  Synthetically generated peptide
GTCGCAYAACTC

SEQ ID NO: 169 - protein, 13 aa, Artificial Sequence
  Synthetically generated peptide
GTCGICYAACTGC

SEQ ID NO: 170 - protein, 12 aa, Artificial Sequence
  Synthetically generated peptide
GTCGICAACTGC

SEQ ID NO: 171 - protein, 12 aa, Artificial Sequence
  Synthetically generated peptide
GTCGICYACTGC

SEQ ID NO: 172 - protein, 12 aa, Artificial Sequence
  Synthetically generated peptide
GTCGICYACTGC

SEQ ID NO: 173 - protein, 12 aa, Artificial Sequence
  Synthetically generated peptide
GTCGICYAACGC

SEQ ID NO: 174 - protein, 12 aa, Artificial Sequence
  Synthetically generated peptide
GTCGICYAACTC

SEQ ID NO: 175 - protein, 13 aa, Artificial Sequence
  Synthetically generated peptide
GTCGICAAACTGC

SEQ ID NO: 176 - protein, 12 aa, Artificial Sequence
  Synthetically generated peptide
GTCGICAACTGC

SEQ ID NO: 177 - protein, 12 aa, Artificial Sequence
  Synthetically generated peptide
GTCGICAACTGC

SEQ ID NO: 178 - protein, 12 aa, Artificial Sequence
  Synthetically generated peptide
GTCGICAAACGC

SEQ ID NO: 179 - protein, 12 aa, Artificial Sequence
  Synthetically generated peptide
GTCGICAAACTC

SEQ ID NO: 180 - protein, 13 aa, Artificial Sequence
  Synthetically generated peptide
GTCGICAYACTGC

SEQ ID NO: 181 - protein, 12 aa, Artificial Sequence
  Synthetically generated peptide
GTCGICAYCTGC

SEQ ID NO: 182 - protein, 12 aa, Artificial Sequence
  Synthetically generated peptide
GTCGICAYACGC

SEQ ID NO: 183 - protein, 12 aa, Artificial Sequence
  Synthetically generated peptide
GTCGICAYACTC

SEQ ID NO: 184 - protein, 13 aa, Artificial Sequence
  Synthetically generated peptide
GTCGICAYACTGC

SEQ ID NO: 185 - protein, 12 aa, Artificial Sequence
  Synthetically generated peptide
GTCGICAYACGC

SEQ ID NO: 186 - protein, 12 aa, Artificial Sequence
  Synthetically generated peptide
GTCGICAYACTC

SEQ ID NO: 187 - protein, 13 aa, Artificial Sequence
  Synthetically generated peptide
GTCGICAYAACGC

SEQ ID NO: 188 - protein, 12 aa, Artificial Sequence
  Synthetically generated peptide
GTCGICAYAACC

SEQ ID NO: 189 - protein, 13 aa, Artificial Sequence
  Synthetically generated peptide
GTCGICAYAACTC

SEQ ID NO: 190 - protein, 14 aa, Artificial Sequence
  Synthetically generated peptide
GTCGECAYAACTGC

SEQ ID NO: 191 - protein, 13 aa, Artificial Sequence
  Synthetically generated peptide
GTCGECYAACTGC

SEQ ID NO: 192 - protein, 12 aa, Artificial Sequence
  Synthetically generated peptide
GTCGECAACTGC

SEQ ID NO: 193 - protein, 12 aa, Artificial Sequence
  Synthetically generated peptide
GTCGECYACTGC

SEQ ID NO: 194 - protein, 12 aa, Artificial Sequence
  Synthetically generated peptide
GTCGECYACTGC

SEQ ID NO: 195 - protein, 12 aa, Artificial Sequence
  Synthetically generated peptide
GTCGECYAACGC

SEQ ID NO: 196 - protein, 12 aa, Artificial Sequence
  Synthetically generated peptide
GTCGECYAACTC

SEQ ID NO: 197 - protein, 13 aa, Artificial Sequence
  Synthetically generated peptide
GTCGECAAACTGC

SEQ ID NO: 198 - protein, 12 aa, Artificial Sequence
  Synthetically generated peptide
GTCGECAACTGC

SEQ ID NO: 199 - protein, 12 aa, Artificial Sequence
  Synthetically generated peptide
GTCGECAACTGC

SEQ ID NO: 200 - protein, 12 aa, Artificial Sequence
  Synthetically generated peptide
GTCGECAAACGC

SEQ ID NO: 201 - protein, 12 aa, Artificial Sequence
  Synthetically generated peptide
GTCGECAAACTC

SEQ ID NO: 202 - protein, 13 aa, Artificial Sequence
  Synthetically generated peptide
GTCGECAYACTGC

SEQ ID NO: 203 - protein, 12 aa, Artificial Sequence
  Synthetically generated peptide
GTCGECAYCTGC

SEQ ID NO: 204 - protein, 12 aa, Artificial Sequence
  Synthetically generated peptide
GTCGECAYACGC

SEQ ID NO: 205 - protein, 12 aa, Artificial Sequence
  Synthetically generated peptide
GTCGECAYACTC

SEQ ID NO: 206 - protein, 13 aa, Artificial Sequence
  Synthetically generated peptide
GTCGECAYACTGC

SEQ ID NO: 207 - protein, 12 aa, Artificial Sequence
  Synthetically generated peptide
GTCGECAYACGC

SEQ ID NO: 208 - protein, 12 aa, Artificial Sequence
  Synthetically generated peptide
GTCGECAYACTC

SEQ ID NO: 209 - protein, 13 aa, Artificial Sequence
  Synthetically generated peptide
GTCGECAYAACGC

SEQ ID NO: 210 - protein, 12 aa, Artificial Sequence
  Synthetically generated peptide
GTCGECAYAACC

SEQ ID NO: 211 - protein, 13 aa, Artificial Sequence
  Synthetically generated peptide
GTCGECAYAACTC

SEQ ID NO: 212 - protein, 14 aa, Artificial Sequence
  Synthetically generated peptide
GTCGEICYAACTGC

SEQ ID NO: 213 - protein, 13 aa, Artificial Sequence
  Synthetically generated peptide
GTCGEICAACTGC

SEQ ID NO: 214 - protein, 12 aa, Artificial Sequence
  Synthetically generated peptide
GTCGEICACTGC

SEQ ID NO: 215 - protein, 12 aa, Artificial Sequence
  Synthetically generated peptide
GTCGEICACTGC

SEQ ID NO: 216 - protein, 12 aa, Artificial Sequence
  Synthetically generated peptide
GTCGEICAACGC

SEQ ID NO: 217 - protein, 12 aa, Artificial Sequence
  Synthetically generated peptide
GTCGEICAACTC

SEQ ID NO: 218 - protein, 13 aa, Artificial Sequence
  Synthetically generated peptide
GTCGEICYACTGC

SEQ ID NO: 219 - protein, 12 aa, Artificial Sequence
  Synthetically generated peptide
GTCGEICYCTGC

SEQ ID NO: 220 - protein, 12 aa, Artificial Sequence
  Synthetically generated peptide
GTCGEICYACGC

SEQ ID NO: 221 - protein, 12 aa, Artificial Sequence
  Synthetically generated peptide
GTCGEICYACTC

SEQ ID NO: 222 - protein, 13 aa, Artificial Sequence
  Synthetically generated peptide
GTCGEICYACTGC

SEQ ID NO: 223 - protein, 12 aa, Artificial Sequence
  Synthetically generated peptide
GTCGEICYACGC

SEQ ID NO: 224 - protein, 12 aa, Artificial Sequence
  Synthetically generated peptide
GTCGEICYACTC

SEQ ID NO: 225 - protein, 13 aa, Artificial Sequence
  Synthetically generated peptide
GTCGEICYAACGC

SEQ ID NO: 226 - protein, 12 aa, Artificial Sequence
  Synthetically generated peptide
GTCGEICYAACC

SEQ ID NO: 227 - protein, 13 aa, Artificial Sequence
  Synthetically generated peptide
GTCGEICYAACTC

SEQ ID NO: 228 - protein, 14 aa, Artificial Sequence
  Synthetically generated peptide
GTCGEICAAACTGC

SEQ ID NO: 229 - protein, 13 aa, Artificial Sequence
  Synthetically generated peptide
GTCGEICAACTGC

SEQ ID NO: 230 - protein, 12 aa, Artificial Sequence
  Synthetically generated peptide
GTCGEICACTGC

SEQ ID NO: 231 - protein, 12 aa, Artificial Sequence
  Synthetically generated peptide
GTCGEICAACGC

SEQ ID NO: 232 - protein, 12 aa, Artificial Sequence
  Synthetically generated peptide
GTCGEICAACTC

SEQ ID NO: 233 - protein, 13 aa, Artificial Sequence
  Synthetically generated peptide
GTCGEICAACTGC

SEQ ID NO: 234 - protein, 12 aa, Artificial Sequence
  Synthetically generated peptide
GTCGEICAACGC

SEQ ID NO: 235 - protein, 12 aa, Artificial Sequence
  Synthetically generated peptide
GTCGEICAACTC

SEQ ID NO: 236 - protein, 13 aa, Artificial Sequence
  Synthetically generated peptide
GTCGEICAAACGC

SEQ ID NO: 237 - protein, 12 aa, Artificial Sequence
  Synthetically generated peptide
GTCGEICAAACC

SEQ ID NO: 238 - protein, 13 aa, Artificial Sequence
  Synthetically generated peptide
GTCGEICAAACTC

SEQ ID NO: 239 - protein, 14 aa, Artificial Sequence
  Synthetically generated peptide
GTCGEICAYACTGC

SEQ ID NO: 240 - protein, 13 aa, Artificial Sequence
  Synthetically generated peptide
GTCGEICAYCTGC

SEQ ID NO: 241 - protein, 12 aa, Artificial Sequence
  Synthetically generated peptide
GTCGEICAYCGC

SEQ ID NO: 242 - protein, 12 aa, Artificial Sequence
  Synthetically generated peptide
GTCGEICAYCTC

SEQ ID NO: 243 - protein, 13 aa, Artificial Sequence
  Synthetically generated peptide
GTCGEICAYACGC

SEQ ID NO: 244 - protein, 12 aa, Artificial Sequence
  Synthetically generated peptide
GTCGEICAYACC

SEQ ID NO: 245 - protein, 13 aa, Artificial Sequence
  Synthetically generated peptide
GTCGEICAYACTC

SEQ ID NO: 246 - protein, 14 aa, Artificial Sequence
  Synthetically generated peptide
GTCGEICAYACTGC

SEQ ID NO: 247 - protein, 13 aa, Artificial Sequence
  Synthetically generated peptide
GTCGEICAYACGC

SEQ ID NO: 248 - protein, 12 aa, Artificial Sequence
  Synthetically generated peptide
GTCGEICAYACC

SEQ ID NO: 249 - protein, 13 aa, Artificial Sequence
  Synthetically generated peptide
GTCGEICAYACTC

SEQ ID NO: 250 - protein, 14 aa, Artificial Sequence
  Synthetically generated peptide
GTCGEICAYAACGC

SEQ ID NO: 251 - protein, 13 aa, Artificial Sequence
  Synthetically generated peptide
GTCGEICAYAACC

SEQ ID NO: 252 - protein, 14 aa, Artificial Sequence
  Synthetically generated peptide
GTCGEICAYAACTC

SEQ ID NO: 253 - protein, 15 aa, Artificial Sequence
  Synthetically generated peptide
PTCGEICAYAACTGC

SEQ ID NO: 254 - protein, 14 aa, Artificial Sequence
  Synthetically generated peptide
PCGEICAYAACTGC

SEQ ID NO: 255 - protein, 13 aa, Artificial Sequence
  Synthetically generated peptide
PCEICAYAACTGC

SEQ ID NO: 256 - protein, 12 aa, Artificial Sequence
  Synthetically generated peptide
PCICAYAACTGC

SEQ ID NO: 257 - protein, 12 aa, Artificial Sequence
  Synthetically generated peptide
PCECAYAACTGC

SEQ ID NO: 258 - protein, 12 aa, Artificial Sequence
  Synthetically generated peptide
PCEICYAACTGC

SEQ ID NO: 259 - protein, 12 aa, Artificial Sequence
  Synthetically generated peptide
PCEICAAACTGC

SEQ ID NO: 260 - protein, 12 aa, Artificial Sequence
  Synthetically generated peptide
PCEICAYACTGC

SEQ ID NO: 261 - protein, 12 aa, Artificial Sequence
  Synthetically generated peptide
PCEICAYACTGC

SEQ ID NO: 262 - protein, 12 aa, Artificial Sequence
  Synthetically generated peptide
PCEICAYAACGC

SEQ ID NO: 263 - protein, 12 aa, Artificial Sequence
  Synthetically generated peptide
PCEICAYAACTC

SEQ ID NO: 264 - protein, 13 aa, Artificial Sequence
  Synthetically generated peptide
PCGICAYAACTGC

SEQ ID NO: 265 - protein, 12 aa, Artificial Sequence
  Synthetically generated peptide
PCGCAYAACTGC

SEQ ID NO: 266 - protein, 12 aa, Artificial Sequence
  Synthetically generated peptide
PCGICYAACTGC

SEQ ID NO: 267 - protein, 12 aa, Artificial Sequence
  Synthetically generated peptide
PCGICAAACTGC

SEQ ID NO: 268 - protein, 12 aa, Artificial Sequence
  Synthetically generated peptide
PCGICAYACTGC

SEQ ID NO: 269 - protein, 12 aa, Artificial Sequence
  Synthetically generated peptide
PCGICAYACTGC

SEQ ID NO: 270 - protein, 12 aa, Artificial Sequence
  Synthetically generated peptide
PCGICAYAACGC

SEQ ID NO: 271 - protein, 12 aa, Artificial Sequence
  Synthetically generated peptide
PCGICAYAACTC

SEQ ID NO: 272 - protein, 13 aa, Artificial Sequence
  Synthetically generated peptide
PCGECAYAACTGC

SEQ ID NO: 273 - protein, 12 aa, Artificial Sequence
  Synthetically generated peptide
PCGECYAACTGC

SEQ ID NO: 274 - protein, 12 aa, Artificial Sequence
  Synthetically generated peptide
PCGECAAACTGC

SEQ ID NO: 275 - protein, 12 aa, Artificial Sequence
  Synthetically generated peptide
PCGECAYACTGC

SEQ ID NO: 276 - protein, 12 aa, Artificial Sequence
  Synthetically generated peptide
PCGECAYACTGC

SEQ ID NO: 277 - protein, 12 aa, Artificial Sequence
  Synthetically generated peptide
PCGECAYAACGC

SEQ ID NO: 278 - protein, 12 aa, Artificial Sequence
  Synthetically generated peptide
PCGECAYAACTC

SEQ ID NO: 279 - protein, 13 aa, Artificial Sequence
  Synthetically generated peptide
PCGEICYAACTGC

SEQ ID NO: 280 - protein, 12 aa, Artificial Sequence
  Synthetically generated peptide
PCGEICAACTGC

SEQ ID NO: 281 - protein, 12 aa, Artificial Sequence
  Synthetically generated peptide
PCGEICYACTGC

SEQ ID NO: 282 - protein, 12 aa, Artificial Sequence
  Synthetically generated peptide
PCGEICYACTGC

SEQ ID NO: 283 - protein, 12 aa, Artificial Sequence
  Synthetically generated peptide
PCGEICYAACGC

SEQ ID NO: 284 - protein, 12 aa, Artificial Sequence
  Synthetically generated peptide
PCGEICYAACTC

SEQ ID NO: 285 - protein, 13 aa, Artificial Sequence
  Synthetically generated peptide
PCGEICAAACTGC

SEQ ID NO: 286 - protein, 12 aa, Artificial Sequence
  Synthetically generated peptide
PCGEICAACTGC

SEQ ID NO: 287 - protein, 12 aa, Artificial Sequence
  Synthetically generated peptide
PCGEICAACTGC

SEQ ID NO: 288 - protein, 12 aa, Artificial Sequence
  Synthetically generated peptide
PCGEICAAACGC

SEQ ID NO: 289 - protein, 12 aa, Artificial Sequence
  Synthetically generated peptide
PCGEICAAACTC

SEQ ID NO: 290 - protein, 13 aa, Artificial Sequence
  Synthetically generated peptide
PCGEICAYACTGC

SEQ ID NO: 291 - protein, 12 aa, Artificial Sequence
  Synthetically generated peptide
PCGEICAYCTGC

SEQ ID NO: 292 - protein, 12 aa, Artificial Sequence
  Synthetically generated peptide
PCGEICAYACGC

SEQ ID NO: 293 - protein, 12 aa, Artificial Sequence
  Synthetically generated peptide
PCGEICAYACTC

SEQ ID NO: 294 - protein, 13 aa, Artificial Sequence
  Synthetically generated peptide
PCGEICAYACTGC

SEQ ID NO: 295 - protein, 12 aa, Artificial Sequence
  Synthetically generated peptide
PCGEICAYACGC

SEQ ID NO: 296 - protein, 12 aa, Artificial Sequence
  Synthetically generated peptide
PCGEICAYACTC

SEQ ID NO: 297 - protein, 13 aa, Artificial Sequence
  Synthetically generated peptide
PCGEICAYAACGC

SEQ ID NO: 298 - protein, 12 aa, Artificial Sequence
  Synthetically generated peptide
PCGEICAYAACC

SEQ ID NO: 299 - protein, 13 aa, Artificial Sequence
  Synthetically generated peptide
PCGEICAYAACTC

SEQ ID NO: 300 - protein, 14 aa, Artificial Sequence
  Synthetically generated peptide
PTCEICAYAACTGC

SEQ ID NO: 301 - protein, 13 aa, Artificial Sequence
  Synthetically generated peptide
PTCICAYAACTGC

SEQ ID NO: 302 - protein, 12 aa, Artificial Sequence
  Synthetically generated peptide
PTCCAYAACTGC

SEQ ID NO: 303 - protein, 12 aa, Artificial Sequence
  Synthetically generated peptide
PTCICYAACTGC

SEQ ID NO: 304 - protein, 12 aa, Artificial Sequence
  Synthetically generated peptide
PTCICAAACTGC

SEQ ID NO: 305 - protein, 12 aa, Artificial Sequence
  Synthetically generated peptide
PTCICAYACTGC

SEQ ID NO: 306 - protein, 12 aa, Artificial Sequence
  Synthetically generated peptide
PTCICAYACTGC

SEQ ID NO: 307 - protein, 12 aa, Artificial Sequence
  Synthetically generated peptide
PTCICAYAACGC

SEQ ID NO: 308 - protein, 12 aa, Artificial Sequence
  Synthetically generated peptide
PTCICAYAACTC

SEQ ID NO: 309 - protein, 13 aa, Artificial Sequence
  Synthetically generated peptide
PTCECAYAACTGC

SEQ ID NO: 310 - protein, 12 aa, Artificial Sequence
  Synthetically generated peptide
PTCECYAACTGC

SEQ ID NO: 311 - protein, 12 aa, Artificial Sequence
  Synthetically generated peptide
PTCECAAACTGC

SEQ ID NO: 312 - protein, 12 aa, Artificial Sequence
  Synthetically generated peptide
PTCECAYACTGC

SEQ ID NO: 313 - protein, 12 aa, Artificial Sequence
  Synthetically generated peptide
PTCECAYACTGC

SEQ ID NO: 314 - protein, 12 aa, Artificial Sequence
  Synthetically generated peptide
PTCECAYAACGC

SEQ ID NO: 315 - protein, 12 aa, Artificial Sequence
  Synthetically generated peptide
PTCECAYAACTC

SEQ ID NO: 316 - protein, 13 aa, Artificial Sequence
  Synthetically generated peptide
PTCEICYAACTGC

SEQ ID NO: 317 - protein, 12 aa, Artificial Sequence
  Synthetically generated peptide
PTCEICAACTGC

SEQ ID NO: 318 - protein, 12 aa, Artificial Sequence
  Synthetically generated peptide
PTCEICYACTGC

SEQ ID NO: 319 - protein, 12 aa, Artificial Sequence
  Synthetically generated peptide
PTCEICYACTGC

SEQ ID NO: 320 - protein, 12 aa, Artificial Sequence
  Synthetically generated peptide
PTCEICYAACGC

SEQ ID NO: 321 - protein, 12 aa, Artificial Sequence
  Synthetically generated peptide
PTCEICYAACTC

SEQ ID NO: 322 - protein, 13 aa, Artificial Sequence
  Synthetically generated peptide
PTCEICAAACTGC

SEQ ID NO: 323 - protein, 12 aa, Artificial Sequence
  Synthetically generated peptide
PTCEICAACTGC

SEQ ID NO: 324 - protein, 12 aa, Artificial Sequence
  Synthetically generated peptide
PTCEICAACTGC

SEQ ID NO: 325 - protein, 12 aa, Artificial Sequence
  Synthetically generated peptide
PTCEICAAACGC

SEQ ID NO: 326 - protein, 12 aa, Artificial Sequence
  Synthetically generated peptide
PTCEICAAACTC

SEQ ID NO: 327 - protein, 13 aa, Artificial Sequence
  Synthetically generated peptide
PTCEICAYACTGC

SEQ ID NO: 328 - protein, 12 aa, Artificial Sequence
  Synthetically generated peptide
PTCEICAYCTGC

SEQ ID NO: 329 - protein, 12 aa, Artificial Sequence
  Synthetically generated peptide
PTCEICAYACGC

SEQ ID NO: 330 - protein, 12 aa, Artificial Sequence
  Synthetically generated peptide
PTCEICAYACTC

SEQ ID NO: 331 - protein, 13 aa, Artificial Sequence
  Synthetically generated peptide
PTCEICAYACTGC

SEQ ID NO: 332 - protein, 12 aa, Artificial Sequence
  Synthetically generated peptide
PTCEICAYACGC

SEQ ID NO: 333 - protein, 12 aa, Artificial Sequence
  Synthetically generated peptide
PTCEICAYACTC

SEQ ID NO: 334 - protein, 13 aa, Artificial Sequence
  Synthetically generated peptide
PTCEICAYAACGC

SEQ ID NO: 335 - protein, 12 aa, Artificial Sequence
  Synthetically generated peptide
PTCEICAYAACC

SEQ ID NO: 336 - protein, 13 aa, Artificial Sequence
  Synthetically generated peptide
PTCEICAYAACTC

SEQ ID NO: 337 - protein, 14 aa, Artificial Sequence
  Synthetically generated peptide
PTCGICAYAACTGC

SEQ ID NO: 338 - protein, 13 aa, Artificial Sequence
  Synthetically generated peptide
PTCGCAYAACTGC

SEQ ID NO: 339 - protein, 12 aa, Artificial Sequence
  Synthetically generated peptide
PTCGCYAACTGC

SEQ ID NO: 340 - protein, 12 aa, Artificial Sequence
  Synthetically generated peptide
PTCGCAAACTGC

SEQ ID NO: 341 - protein, 12 aa, Artificial Sequence
  Synthetically generated peptide
PTCGCAYACTGC

SEQ ID NO: 342 - protein, 12 aa, Artificial Sequence
  Synthetically generated peptide
PTCGCAYACTGC

SEQ ID NO: 343 - protein, 12 aa, Artificial Sequence
  Synthetically generated peptide
PTCGCAYAACGC

SEQ ID NO: 344 - protein, 12 aa, Artificial Sequence
  Synthetically generated peptide
PTCGCAYAACTC

SEQ ID NO: 345 - protein, 13 aa, Artificial Sequence
  Synthetically generated peptide
PTCGICYAACTGC

SEQ ID NO: 346 - protein, 12 aa, Artificial Sequence
  Synthetically generated peptide
PTCGICAACTGC

SEQ ID NO: 347 - protein, 12 aa, Artificial Sequence
  Synthetically generated peptide
PTCGICYACTGC

SEQ ID NO: 348 - protein, 12 aa, Artificial Sequence
  Synthetically generated peptide
PTCGICYACTGC

SEQ ID NO: 349 - protein, 12 aa, Artificial Sequence
  Synthetically generated peptide
PTCGICYAACGC

SEQ ID NO: 350 - protein, 12 aa, Artificial Sequence
  Synthetically generated peptide
PTCGICYAACTC

SEQ ID NO: 351 - protein, 13 aa, Artificial Sequence
  Synthetically generated peptide
PTCGICAAACTGC

SEQ ID NO: 352 - protein, 12 aa, Artificial Sequence
  Synthetically generated peptide
PTCGICAACTGC

SEQ ID NO: 353 - protein, 12 aa, Artificial Sequence
  Synthetically generated peptide
PTCGICAACTGC

SEQ ID NO: 354 - protein, 12 aa, Artificial Sequence
  Synthetically generated peptide
PTCGICAAACGC

SEQ ID NO: 355 - protein, 12 aa, Artificial Sequence
  Synthetically generated peptide
PTCGICAAACTC

SEQ ID NO: 356 - protein, 13 aa, Artificial Sequence
  Synthetically generated peptide
PTCGICAYACTGC

SEQ ID NO: 357 - protein, 12 aa, Artificial Sequence
  Synthetically generated peptide
PTCGICAYCTGC

SEQ ID NO: 358 - protein, 12 aa, Artificial Sequence
  Synthetically generated peptide
PTCGICAYACGC

SEQ ID NO: 359 - protein, 12 aa, Artificial Sequence
  Synthetically generated peptide
PTCGICAYACTC

SEQ ID NO: 360 - protein, 13 aa, Artificial Sequence
  Synthetically generated peptide
PTCGICAYACTGC

SEQ ID NO: 361 - protein, 12 aa, Artificial Sequence
  Synthetically generated peptide
PTCGICAYACGC

SEQ ID NO: 362 - protein, 12 aa, Artificial Sequence
  Synthetically generated peptide
PTCGICAYACTC

SEQ ID NO: 363 - protein, 13 aa, Artificial Sequence
  Synthetically generated peptide
PTCGICAYAACGC

SEQ ID NO: 364 - protein, 12 aa, Artificial Sequence
  Synthetically generated peptide
PTCGICAYAACC

SEQ ID NO: 365 - protein, 13 aa, Artificial Sequence
  Synthetically generated peptide
PTCGICAYAACTC

SEQ ID NO: 366 - protein, 14 aa, Artificial Sequence
  Synthetically generated peptide
PTCGECAYAACTGC

SEQ ID NO: 367 - protein, 13 aa, Artificial Sequence
  Synthetically generated peptide
PTCGECYAACTGC

SEQ ID NO: 368 - protein, 12 aa, Artificial Sequence
  Synthetically generated peptide
PTCGECAACTGC

SEQ ID NO: 369 - protein, 12 aa, Artificial Sequence
  Synthetically generated peptide
PTCGECYACTGC

SEQ ID NO: 370 - protein, 12 aa, Artificial Sequence
  Synthetically generated peptide
PTCGECYACTGC

SEQ ID NO: 371 - protein, 12 aa, Artificial Sequence
  Synthetically generated peptide
PTCGECYAACGC

SEQ ID NO: 372 - protein, 12 aa, Artificial Sequence
  Synthetically generated peptide
PTCGECYAACTC

SEQ ID NO: 373 - protein, 13 aa, Artificial Sequence
  Synthetically generated peptide
PTCGECAAACTGC

SEQ ID NO: 374 - protein, 12 aa, Artificial Sequence
  Synthetically generated peptide
PTCGECAACTGC

SEQ ID NO: 375 - protein, 12 aa, Artificial Sequence
  Synthetically generated peptide
PTCGECAACTGC

SEQ ID NO: 376 - protein, 12 aa, Artificial Sequence
  Synthetically generated peptide
PTCGECAAACGC

SEQ ID NO: 377 - protein, 12 aa, Artificial Sequence
  Synthetically generated peptide
PTCGECAAACTC

SEQ ID NO: 378 - protein, 13 aa, Artificial Sequence
  Synthetically generated peptide
PTCGECAYACTGC

SEQ ID NO: 379 - protein, 12 aa, Artificial Sequence
  Synthetically generated peptide
PTCGECAYCTGC

SEQ ID NO: 380 - protein, 12 aa, Artificial Sequence
  Synthetically generated peptide
PTCGECAYACGC

SEQ ID NO: 381 - protein, 12 aa, Artificial Sequence
  Synthetically generated peptide
PTCGECAYACTC

SEQ ID NO: 382 - protein, 13 aa, Artificial Sequence
  Synthetically generated peptide
PTCGECAYACTGC

SEQ ID NO: 383 - protein, 12 aa, Artificial Sequence
  Synthetically generated peptide
PTCGECAYACGC

SEQ ID NO: 384 - protein, 12 aa, Artificial Sequence
  Synthetically generated peptide
PTCGECAYACTC

SEQ ID NO: 385 - protein, 13 aa, Artificial Sequence
  Synthetically generated peptide
PTCGECAYAACGC

SEQ ID NO: 386 - protein, 12 aa, Artificial Sequence
  Synthetically generated peptide
PTCGECAYAACC

SEQ ID NO: 387 - protein, 13 aa, Artificial Sequence
  Synthetically generated peptide
PTCGECAYAACTC

SEQ ID NO: 388 - protein, 14 aa, Artificial Sequence
  Synthetically generated peptide
PTCGEICYAACTGC

SEQ ID NO: 389 - protein, 13 aa, Artificial Sequence
  Synthetically generated peptide
PTCGEICAACTGC

SEQ ID NO: 390 - protein, 12 aa, Artificial Sequence
  Synthetically generated peptide
PTCGEICACTGC

SEQ ID NO: 391 - protein, 12 aa, Artificial Sequence
  Synthetically generated peptide
PTCGEICACTGC

SEQ ID NO: 392 - protein, 12 aa, Artificial Sequence
  Synthetically generated peptide
PTCGEICAACGC

SEQ ID NO: 393 - protein, 12 aa, Artificial Sequence
  Synthetically generated peptide
PTCGEICAACTC

SEQ ID NO: 394 - protein, 13 aa, Artificial Sequence
  Synthetically generated peptide
PTCGEICYACTGC

SEQ ID NO: 395 - protein, 12 aa, Artificial Sequence
  Synthetically generated peptide
PTCGEICYCTGC

SEQ ID NO: 396 - protein, 12 aa, Artificial Sequence
  Synthetically generated peptide
PTCGEICYACGC

SEQ ID NO: 397 - protein, 12 aa, Artificial Sequence
  Synthetically generated peptide
PTCGEICYACTC

SEQ ID NO: 398 - protein, 13 aa, Artificial Sequence
  Synthetically generated peptide
PTCGEICYACTGC

SEQ ID NO: 399 - protein, 12 aa, Artificial Sequence
  Synthetically generated peptide
PTCGEICYACGC

SEQ ID NO: 400 - protein, 12 aa, Artificial Sequence
  Synthetically generated peptide
PTCGEICYACTC

SEQ ID NO: 401 - protein, 13 aa, Artificial Sequence
  Synthetically generated peptide
PTCGEICYAACGC

SEQ ID NO: 402 - protein, 12 aa, Artificial Sequence
  Synthetically generated peptide
PTCGEICYAACC

SEQ ID NO: 403 - protein, 13 aa, Artificial Sequence
  Synthetically generated peptide
PTCGEICYAACTC

SEQ ID NO: 404 - protein, 14 aa, Artificial Sequence
  Synthetically generated peptide
PTCGEICAAACTGC

SEQ ID NO: 405 - protein, 13 aa, Artificial Sequence
  Synthetically generated peptide
PTCGEICAACTGC

SEQ ID NO: 406 - protein, 12 aa, Artificial Sequence
  Synthetically generated peptide
PTCGEICACTGC

SEQ ID NO: 407 - protein, 12 aa, Artificial Sequence
  Synthetically generated peptide
PTCGEICAACGC

SEQ ID NO: 408 - protein, 12 aa, Artificial Sequence
  Synthetically generated peptide
PTCGEICAACTC

SEQ ID NO: 409 - protein, 13 aa, Artificial Sequence
  Synthetically generated peptide
PTCGEICAACTGC

SEQ ID NO: 410 - protein, 12 aa, Artificial Sequence
  Synthetically generated peptide
PTCGEICAACGC

SEQ ID NO: 411 - protein, 12 aa, Artificial Sequence
  Synthetically generated peptide
PTCGEICAACTC

SEQ ID NO: 412 - protein, 13 aa, Artificial Sequence
  Synthetically generated peptide
PTCGEICAAACGC

SEQ ID NO: 413 - protein, 12 aa, Artificial Sequence
  Synthetically generated peptide
PTCGEICAAACC

SEQ ID NO: 414 - protein, 13 aa, Artificial Sequence
  Synthetically generated peptide
PTCGEICAAACTC

SEQ ID NO: 415 - protein, 14 aa, Artificial Sequence
  Synthetically generated peptide
PTCGEICAYACTGC

SEQ ID NO: 416 - protein, 13 aa, Artificial Sequence
  Synthetically generated peptide
PTCGEICAYCTGC

SEQ ID NO: 417 - protein, 12 aa, Artificial Sequence
  Synthetically generated peptide
PTCGEICAYCGC

SEQ ID NO: 418 - protein, 12 aa, Artificial Sequence
  Synthetically generated peptide
PTCGEICAYCTC

SEQ ID NO: 419 - protein, 13 aa, Artificial Sequence
  Synthetically generated peptide
PTCGEICAYACGC

SEQ ID NO: 420 - protein, 12 aa, Artificial Sequence
  Synthetically generated peptide
PTCGEICAYACC

SEQ ID NO: 421 - protein, 13 aa, Artificial Sequence
  Synthetically generated peptide
PTCGEICAYACTC

SEQ ID NO: 422 - protein, 14 aa, Artificial Sequence
  Synthetically generated peptide
PTCGEICAYACTGC

SEQ ID NO: 423 - protein, 13 aa, Artificial Sequence
  Synthetically generated peptide
PTCGEICAYACGC

SEQ ID NO: 424 - protein, 12 aa, Artificial Sequence
  Synthetically generated peptide
PTCGEICAYACC

SEQ ID NO: 425 - protein, 13 aa, Artificial Sequence
  Synthetically generated peptide
PTCGEICAYACTC

SEQ ID NO: 426 - protein, 14 aa, Artificial Sequence
  Synthetically generated peptide
PTCGEICAYAACGC

SEQ ID NO: 427 - protein, 13 aa, Artificial Sequence
  Synthetically generated peptide
PTCGEICAYAACC

SEQ ID NO: 428 - protein, 14 aa, Artificial Sequence
  Synthetically generated peptide
PTCGEICAYAACTC

SEQ ID NO: 429 - protein, 15 aa, Artificial Sequence
  Synthetically generated peptide
PGCGEICAYAACTGC

SEQ ID NO: 430 - protein, 14 aa, Artificial Sequence
  Synthetically generated peptide
PGCEICAYAACTGC

SEQ ID NO: 431 - protein, 13 aa, Artificial Sequence
  Synthetically generated peptide
PGCICAYAACTGC

SEQ ID NO: 432 - protein, 12 aa, Artificial Sequence
  Synthetically generated peptide
PGCCAYAACTGC

SEQ ID NO: 433 - protein, 12 aa, Artificial Sequence
  Synthetically generated peptide
PGCICYAACTGC

SEQ ID NO: 434 - protein, 12 aa, Artificial Sequence
  Synthetically generated peptide
PGCICAAACTGC

SEQ ID NO: 435 - protein, 12 aa, Artificial Sequence
  Synthetically generated peptide
PGCICAYACTGC

SEQ ID NO: 436 - protein, 12 aa, Artificial Sequence
  Synthetically generated peptide
PGCICAYACTGC

SEQ ID NO: 437 - protein, 12 aa, Artificial Sequence
  Synthetically generated peptide
PGCICAYAACGC

SEQ ID NO: 438 - protein, 12 aa, Artificial Sequence
  Synthetically generated peptide
PGCICAYAACTC

SEQ ID NO: 439 - protein, 13 aa, Artificial Sequence
  Synthetically generated peptide
PGCECAYAACTGC

SEQ ID NO: 440 - protein, 12 aa, Artificial Sequence
  Synthetically generated peptide
PGCECYAACTGC

SEQ ID NO: 441 - protein, 12 aa, Artificial Sequence
  Synthetically generated peptide
PGCECAAACTGC

SEQ ID NO: 442 - protein, 12 aa, Artificial Sequence
  Synthetically generated peptide
PGCECAYACTGC

SEQ ID NO: 443 - protein, 12 aa, Artificial Sequence
  Synthetically generated peptide
PGCECAYACTGC

SEQ ID NO: 444 - protein, 12 aa, Artificial Sequence
  Synthetically generated peptide
PGCECAYAACGC

SEQ ID NO: 445 - protein, 12 aa, Artificial Sequence
  Synthetically generated peptide
PGCECAYAACTC

SEQ ID NO: 446 - protein, 13 aa, Artificial Sequence
  Synthetically generated peptide
PGCEICYAACTGC

SEQ ID NO: 447 - protein, 12 aa, Artificial Sequence
  Synthetically generated peptide
PGCEICAACTGC

SEQ ID NO: 448 - protein, 12 aa, Artificial Sequence
  Synthetically generated peptide
PGCEICYACTGC

SEQ ID NO: 449 - protein, 12 aa, Artificial Sequence
  Synthetically generated peptide
PGCEICYACTGC

SEQ ID NO: 450 - protein, 12 aa, Artificial Sequence
  Synthetically generated peptide
PGCEICYAACGC

SEQ ID NO: 451 - protein, 12 aa, Artificial Sequence
  Synthetically generated peptide
PGCEICYAACTC

SEQ ID NO: 452 - protein, 13 aa, Artificial Sequence
  Synthetically generated peptide
PGCEICAAACTGC

SEQ ID NO: 453 - protein, 12 aa, Artificial Sequence
  Synthetically generated peptide
PGCEICAACTGC

SEQ ID NO: 454 - protein, 12 aa, Artificial Sequence
  Synthetically generated peptide
PGCEICAACTGC

SEQ ID NO: 455 - protein, 12 aa, Artificial Sequence
  Synthetically generated peptide
PGCEICAAACGC

SEQ ID NO: 456 - protein, 12 aa, Artificial Sequence
  Synthetically generated peptide
PGCEICAAACTC

SEQ ID NO: 457 - protein, 13 aa, Artificial Sequence
  Synthetically generated peptide
PGCEICAYACTGC

SEQ ID NO: 458 - protein, 12 aa, Artificial Sequence
  Synthetically generated peptide
PGCEICAYCTGC

SEQ ID NO: 459 - protein, 12 aa, Artificial Sequence
  Synthetically generated peptide
PGCEICAYACGC

SEQ ID NO: 460 - protein, 12 aa, Artificial Sequence
  Synthetically generated peptide
PGCEICAYACTC

SEQ ID NO: 461 - protein, 13 aa, Artificial Sequence
  Synthetically generated peptide
PGCEICAYACTGC

SEQ ID NO: 462 - protein, 12 aa, Artificial Sequence
  Synthetically generated peptide
PGCEICAYACGC

SEQ ID NO: 463 - protein, 12 aa, Artificial Sequence
  Synthetically generated peptide
PGCEICAYACTC

SEQ ID NO: 464 - protein, 13 aa, Artificial Sequence
  Synthetically generated peptide
PGCEICAYAACGC

SEQ ID NO: 465 - protein, 12 aa, Artificial Sequence
  Synthetically generated peptide
PGCEICAYAACC

SEQ ID NO: 466 - protein, 13 aa, Artificial Sequence
  Synthetically generated peptide
PGCEICAYAACTC

SEQ ID NO: 467 - protein, 14 aa, Artificial Sequence
  Synthetically generated peptide
PGCGICAYAACTGC

SEQ ID NO: 468 - protein, 13 aa, Artificial Sequence
  Synthetically generated peptide
PGCGCAYAACTGC

SEQ ID NO: 469 - protein, 12 aa, Artificial Sequence
  Synthetically generated peptide
PGCGCYAACTGC

SEQ ID NO: 470 - protein, 12 aa, Artificial Sequence
  Synthetically generated peptide
PGCGCAAACTGC

SEQ ID NO: 471 - protein, 12 aa, Artificial Sequence
  Synthetically generated peptide
PGCGCAYACTGC

SEQ ID NO: 472 - protein, 12 aa, Artificial Sequence
  Synthetically generated peptide
PGCGCAYACTGC

SEQ ID NO: 473 - protein, 12 aa, Artificial Sequence
  Synthetically generated peptide
PGCGCAYAACGC

SEQ ID NO: 474 - protein, 12 aa, Artificial Sequence
  Synthetically generated peptide
PGCGCAYAACTC

SEQ ID NO: 475 - protein, 13 aa, Artificial Sequence
  Synthetically generated peptide
PGCGICYAACTGC

SEQ ID NO: 476 - protein, 12 aa, Artificial Sequence
  Synthetically generated peptide
PGCGICAACTGC

SEQ ID NO: 477 - protein, 12 aa, Artificial Sequence
  Synthetically generated peptide
PGCGICYACTGC

SEQ ID NO: 478 - protein, 12 aa, Artificial Sequence
  Synthetically generated peptide
PGCGICYACTGC

SEQ ID NO: 479 - protein, 12 aa, Artificial Sequence
  Synthetically generated peptide
PGCGICYAACGC

SEQ ID NO: 480 - protein, 12 aa, Artificial Sequence
  Synthetically generated peptide
PGCGICYAACTC

SEQ ID NO: 481 - protein, 13 aa, Artificial Sequence
  Synthetically generated peptide
PGCGICAAACTGC

SEQ ID NO: 482 - protein, 12 aa, Artificial Sequence
  Synthetically generated peptide
PGCGICAACTGC

SEQ ID NO: 483 - protein, 12 aa, Artificial Sequence
  Synthetically generated peptide
PGCGICAACTGC

SEQ ID NO: 484 - protein, 12 aa, Artificial Sequence
  Synthetically generated peptide
PGCGICAAACGC

SEQ ID NO: 485 - protein, 12 aa, Artificial Sequence
  Synthetically generated peptide
PGCGICAAACTC

SEQ ID NO: 486 - protein, 13 aa, Artificial Sequence
  Synthetically generated peptide
PGCGICAYACTGC

SEQ ID NO: 487 - protein, 12 aa, Artificial Sequence
  Synthetically generated peptide
PGCGICAYCTGC

SEQ ID NO: 488 - protein, 12 aa, Artificial Sequence
  Synthetically generated peptide
PGCGICAYACGC

SEQ ID NO: 489 - protein, 12 aa, Artificial Sequence
  Synthetically generated peptide
PGCGICAYACTC

SEQ ID NO: 490 - protein, 13 aa, Artificial Sequence
  Synthetically generated peptide
PGCGICAYACTGC

SEQ ID NO: 491 - protein, 12 aa, Artificial Sequence
  Synthetically generated peptide
PGCGICAYACGC

SEQ ID NO: 492 - protein, 12 aa, Artificial Sequence
  Synthetically generated peptide
PGCGICAYACTC

SEQ ID NO: 493 - protein, 13 aa, Artificial Sequence
  Synthetically generated peptide
PGCGICAYAACGC

SEQ ID NO: 494 - protein, 12 aa, Artificial Sequence
  Synthetically generated peptide
PGCGICAYAACC

SEQ ID NO: 495 - protein, 13 aa, Artificial Sequence
  Synthetically generated peptide
PGCGICAYAACTC

SEQ ID NO: 496 - protein, 14 aa, Artificial Sequence
  Synthetically generated peptide
PGCGECAYAACTGC

SEQ ID NO: 497 - protein, 13 aa, Artificial Sequence
  Synthetically generated peptide
PGCGECYAACTGC

SEQ ID NO: 498 - protein, 12 aa, Artificial Sequence
  Synthetically generated peptide
PGCGECAACTGC

SEQ ID NO: 499 - protein, 12 aa, Artificial Sequence
  Synthetically generated peptide
PGCGECYACTGC

SEQ ID NO: 500 - protein, 12 aa, Artificial Sequence
  Synthetically generated peptide
PGCGECYACTGC

SEQ ID NO: 501 - protein, 12 aa, Artificial Sequence
  Synthetically generated peptide
PGCGECYAACGC

SEQ ID NO: 502 - protein, 12 aa, Artificial Sequence
  Synthetically generated peptide
PGCGECYAACTC

SEQ ID NO: 503 - protein, 13 aa, Artificial Sequence
  Synthetically generated peptide
PGCGECAAACTGC

SEQ ID NO: 504 - protein, 12 aa, Artificial Sequence
  Synthetically generated peptide
PGCGECAACTGC

SEQ ID NO: 505 - protein, 12 aa, Artificial Sequence
  Synthetically generated peptide
PGCGECAACTGC

SEQ ID NO: 506 - protein, 12 aa, Artificial Sequence
  Synthetically generated peptide
PGCGECAAACGC

SEQ ID NO: 507 - protein, 12 aa, Artificial Sequence
  Synthetically generated peptide
PGCGECAAACTC

SEQ ID NO: 508 - protein, 13 aa, Artificial Sequence
  Synthetically generated peptide
PGCGECAYACTGC

SEQ ID NO: 509 - protein, 12 aa, Artificial Sequence
  Synthetically generated peptide
PGCGECAYCTGC

SEQ ID NO: 510 - protein, 12 aa, Artificial Sequence
  Synthetically generated peptide
PGCGECAYACGC

SEQ ID NO: 511 - protein, 12 aa, Artificial Sequence
  Synthetically generated peptide
PGCGECAYACTC

SEQ ID NO: 512 - protein, 13 aa, Artificial Sequence
  Synthetically generated peptide
PGCGECAYACTGC

SEQ ID NO: 513 - protein, 12 aa, Artificial Sequence
  Synthetically generated peptide
PGCGECAYACGC

SEQ ID NO: 514 - protein, 12 aa, Artificial Sequence
  Synthetically generated peptide
PGCGECAYACTC

SEQ ID NO: 515 - protein, 13 aa, Artificial Sequence
  Synthetically generated peptide
PGCGECAYAACGC

SEQ ID NO: 516 - protein, 12 aa, Artificial Sequence
  Synthetically generated peptide
PGCGECAYAACC

SEQ ID NO: 517 - protein, 13 aa, Artificial Sequence
  Synthetically generated peptide
PGCGECAYAACTC

SEQ ID NO: 518 - protein, 14 aa, Artificial Sequence
  Synthetically generated peptide
PGCGEICYAACTGC

SEQ ID NO: 519 - protein, 13 aa, Artificial Sequence
  Synthetically generated peptide
PGCGEICAACTGC

SEQ ID NO: 520 - protein, 12 aa, Artificial Sequence
  Synthetically generated peptide
PGCGEICACTGC

SEQ ID NO: 521 - protein, 12 aa, Artificial Sequence
  Synthetically generated peptide
PGCGEICACTGC

SEQ ID NO: 522 - protein, 12 aa, Artificial Sequence
  Synthetically generated peptide
PGCGEICAACGC

SEQ ID NO: 523 - protein, 12 aa, Artificial Sequence
  Synthetically generated peptide
PGCGEICAACTC

SEQ ID NO: 524 - protein, 13 aa, Artificial Sequence
  Synthetically generated peptide
PGCGEICYACTGC

SEQ ID NO: 525 - protein, 12 aa, Artificial Sequence
  Synthetically generated peptide
PGCGEICYCTGC

SEQ ID NO: 526 - protein, 12 aa, Artificial Sequence
  Synthetically generated peptide
PGCGEICYACGC

SEQ ID NO: 527 - protein, 12 aa, Artificial Sequence
  Synthetically generated peptide
PGCGEICYACTC

SEQ ID NO: 528 - protein, 13 aa, Artificial Sequence
  Synthetically generated peptide
PGCGEICYACTGC

SEQ ID NO: 529 - protein, 12 aa, Artificial Sequence
  Synthetically generated peptide
PGCGEICYACGC

SEQ ID NO: 530 - protein, 12 aa, Artificial Sequence
  Synthetically generated peptide
PGCGEICYACTC

SEQ ID NO: 531 - protein, 13 aa, Artificial Sequence
  Synthetically generated peptide
PGCGEICYAACGC

SEQ ID NO: 532 - protein, 12 aa, Artificial Sequence
  Synthetically generated peptide
PGCGEICYAACC

SEQ ID NO: 533 - protein, 13 aa, Artificial Sequence
  Synthetically generated peptide
PGCGEICYAACTC

SEQ ID NO: 534 - protein, 14 aa, Artificial Sequence
  Synthetically generated peptide
PGCGEICAAACTGC

SEQ ID NO: 535 - protein, 13 aa, Artificial Sequence
  Synthetically generated peptide
PGCGEICAACTGC

SEQ ID NO: 536 - protein, 12 aa, Artificial Sequence
  Synthetically generated peptide
PGCGEICACTGC

SEQ ID NO: 537 - protein, 12 aa, Artificial Sequence
  Synthetically generated peptide
PGCGEICAACGC

SEQ ID NO: 538 - protein, 12 aa, Artificial Sequence
  Synthetically generated peptide
PGCGEICAACTC

SEQ ID NO: 539 - protein, 13 aa, Artificial Sequence
  Synthetically generated peptide
PGCGEICAACTGC

SEQ ID NO: 540 - protein, 12 aa, Artificial Sequence
  Synthetically generated peptide
PGCGEICAACGC

SEQ ID NO: 541 - protein, 12 aa, Artificial Sequence
  Synthetically generated peptide
PGCGEICAACTC

SEQ ID NO: 542 - protein, 13 aa, Artificial Sequence
  Synthetically generated peptide
PGCGEICAAACGC

SEQ ID NO: 543 - protein, 12 aa, Artificial Sequence
  Synthetically generated peptide
PGCGEICAAACC

SEQ ID NO: 544 - protein, 13 aa, Artificial Sequence
  Synthetically generated peptide
PGCGEICAAACTC

SEQ ID NO: 545 - protein, 14 aa, Artificial Sequence
  Synthetically generated peptide
PGCGEICAYACTGC

SEQ ID NO: 546 - protein, 13 aa, Artificial Sequence
  Synthetically generated peptide
PGCGEICAYCTGC

SEQ ID NO: 547 - protein, 12 aa, Artificial Sequence
  Synthetically generated peptide
PGCGEICAYCGC

SEQ ID NO: 548 - protein, 12 aa, Artificial Sequence
  Synthetically generated peptide
PGCGEICAYCTC

SEQ ID NO: 549 - protein, 13 aa, Artificial Sequence
  Synthetically generated peptide
PGCGEICAYACGC

SEQ ID NO: 550 - protein, 12 aa, Artificial Sequence
  Synthetically generated peptide
PGCGEICAYACC

SEQ ID NO: 551 - protein, 13 aa, Artificial Sequence
  Synthetically generated peptide
PGCGEICAYACTC

SEQ ID NO: 552 - protein, 14 aa, Artificial Sequence
  Synthetically generated peptide
PGCGEICAYACTGC

SEQ ID NO: 553 - protein, 13 aa, Artificial Sequence
  Synthetically generated peptide
PGCGEICAYACGC

SEQ ID NO: 554 - protein, 12 aa, Artificial Sequence
  Synthetically generated peptide
PGCGEICAYACC

SEQ ID NO: 555 - protein, 13 aa, Artificial Sequence
  Synthetically generated peptide
PGCGEICAYACTC

SEQ ID NO: 556 - protein, 14 aa, Artificial Sequence
  Synthetically generated peptide
PGCGEICAYAACGC

SEQ ID NO: 557 - protein, 13 aa, Artificial Sequence
  Synthetically generated peptide
PGCGEICAYAACC

SEQ ID NO: 558 - protein, 14 aa, Artificial Sequence
  Synthetically generated peptide
PGCGEICAYAACTC

SEQ ID NO: 559 - protein, 15 aa, Artificial Sequence
  Synthetically generated peptide
PGTCEICAYAACTGC

SEQ ID NO: 560 - protein, 14 aa, Artificial Sequence
  Synthetically generated peptide
PGTCICAYAACTGC

SEQ ID NO: 561 - protein, 13 aa, Artificial Sequence
  Synthetically generated peptide
PGTCCAYAACTGC

SEQ ID NO: 562 - protein, 12 aa, Artificial Sequence
  Synthetically generated peptide
PGTCCYAACTGC

SEQ ID NO: 563 - protein, 12 aa, Artificial Sequence
  Synthetically generated peptide
PGTCCAAACTGC

SEQ ID NO: 564 - protein, 12 aa, Artificial Sequence
  Synthetically generated peptide
PGTCCAYACTGC

SEQ ID NO: 565 - protein, 12 aa, Artificial Sequence
  Synthetically generated peptide
PGTCCAYACTGC

SEQ ID NO: 566 - protein, 12 aa, Artificial Sequence
  Synthetically generated peptide
PGTCCAYAACGC

SEQ ID NO: 567 - protein, 12 aa, Artificial Sequence
  Synthetically generated peptide
PGTCCAYAACTC

SEQ ID NO: 568 - protein, 13 aa, Artificial Sequence
  Synthetically generated peptide
PGTCICYAACTGC

SEQ ID NO: 569 - protein, 12 aa, Artificial Sequence
  Synthetically generated peptide
PGTCICAACTGC

SEQ ID NO: 570 - protein, 12 aa, Artificial Sequence
  Synthetically generated peptide
PGTCICYACTGC

SEQ ID NO: 571 - protein, 12 aa, Artificial Sequence
  Synthetically generated peptide
PGTCICYACTGC

SEQ ID NO: 572 - protein, 12 aa, Artificial Sequence
  Synthetically generated peptide
PGTCICYAACGC

SEQ ID NO: 573 - protein, 12 aa, Artificial Sequence
  Synthetically generated peptide
PGTCICYAACTC

SEQ ID NO: 574 - protein, 13 aa, Artificial Sequence
  Synthetically generated peptide
PGTCICAAACTGC

SEQ ID NO: 575 - protein, 12 aa, Artificial Sequence
  Synthetically generated peptide
PGTCICAACTGC

SEQ ID NO: 576 - protein, 12 aa, Artificial Sequence
  Synthetically generated peptide
PGTCICAACTGC

SEQ ID NO: 577 - protein, 12 aa, Artificial Sequence
  Synthetically generated peptide
PGTCICAAACGC

SEQ ID NO: 578 - protein, 12 aa, Artificial Sequence
  Synthetically generated peptide
PGTCICAAACTC

SEQ ID NO: 579 - protein, 13 aa, Artificial Sequence
  Synthetically generated peptide
PGTCICAYACTGC

SEQ ID NO: 580 - protein, 12 aa, Artificial Sequence
  Synthetically generated peptide
PGTCICAYCTGC

SEQ ID NO: 581 - protein, 12 aa, Artificial Sequence
  Synthetically generated peptide
PGTCICAYACGC

SEQ ID NO: 582 - protein, 12 aa, Artificial Sequence
  Synthetically generated peptide
PGTCICAYACTC

SEQ ID NO: 583 - protein, 13 aa, Artificial Sequence
  Synthetically generated peptide
PGTCICAYACTGC

SEQ ID NO: 584 - protein, 12 aa, Artificial Sequence
  Synthetically generated peptide
PGTCICAYACGC

SEQ ID NO: 585 - protein, 12 aa, Artificial Sequence
  Synthetically generated peptide
PGTCICAYACTC

SEQ ID NO: 586 - protein, 13 aa, Artificial Sequence
  Synthetically generated peptide
PGTCICAYAACGC

SEQ ID NO: 587 - protein, 12 aa, Artificial Sequence
  Synthetically generated peptide
PGTCICAYAACC

SEQ ID NO: 588 - protein, 13 aa, Artificial Sequence
  Synthetically generated peptide
PGTCICAYAACTC

SEQ ID NO: 589 - protein, 14 aa, Artificial Sequence
  Synthetically generated peptide
PGTCECAYAACTGC

SEQ ID NO: 590 - protein, 13 aa, Artificial Sequence
  Synthetically generated peptide
PGTCECYAACTGC

SEQ ID NO: 591 - protein, 12 aa, Artificial Sequence
  Synthetically generated peptide
PGTCECAACTGC

SEQ ID NO: 592 - protein, 12 aa, Artificial Sequence
  Synthetically generated peptide
PGTCECYACTGC

SEQ ID NO: 593 - protein, 12 aa, Artificial Sequence
  Synthetically generated peptide
PGTCECYACTGC

SEQ ID NO: 594 - protein, 12 aa, Artificial Sequence
  Synthetically generated peptide
PGTCECYAACGC

SEQ ID NO: 595 - protein, 12 aa, Artificial Sequence
  Synthetically generated peptide
PGTCECYAACTC

SEQ ID NO: 596 - protein, 13 aa, Artificial Sequence
  Synthetically generated peptide
PGTCECAAACTGC

SEQ ID NO: 597 - protein, 12 aa, Artificial Sequence
  Synthetically generated peptide
PGTCECAACTGC

SEQ ID NO: 598 - protein, 12 aa, Artificial Sequence
  Synthetically generated peptide
PGTCECAACTGC

SEQ ID NO: 599 - protein, 12 aa, Artificial Sequence
  Synthetically generated peptide
PGTCECAAACGC

SEQ ID NO: 600 - protein, 12 aa, Artificial Sequence
  Synthetically generated peptide
PGTCECAAACTC

SEQ ID NO: 601 - protein, 13 aa, Artificial Sequence
  Synthetically generated peptide
PGTCECAYACTGC

SEQ ID NO: 602 - protein, 12 aa, Artificial Sequence
  Synthetically generated peptide
PGTCECAYCTGC

SEQ ID NO: 603 - protein, 12 aa, Artificial Sequence
  Synthetically generated peptide
PGTCECAYACGC

SEQ ID NO: 604 - protein, 12 aa, Artificial Sequence
  Synthetically generated peptide
PGTCECAYACTC

SEQ ID NO: 605 - protein, 13 aa, Artificial Sequence
  Synthetically generated peptide
PGTCECAYACTGC

SEQ ID NO: 606 - protein, 12 aa, Artificial Sequence
  Synthetically generated peptide
PGTCECAYACGC

SEQ ID NO: 607 - protein, 12 aa, Artificial Sequence
  Synthetically generated peptide
PGTCECAYACTC

SEQ ID NO: 608 - protein, 13 aa, Artificial Sequence
  Synthetically generated peptide
PGTCECAYAACGC

SEQ ID NO: 609 - protein, 12 aa, Artificial Sequence
  Synthetically generated peptide
PGTCECAYAACC

SEQ ID NO: 610 - protein, 13 aa, Artificial Sequence
  Synthetically generated peptide
PGTCECAYAACTC

SEQ ID NO: 611 - protein, 14 aa, Artificial Sequence
  Synthetically generated peptide
PGTCEICYAACTGC

SEQ ID NO: 612 - protein, 13 aa, Artificial Sequence
  Synthetically generated peptide
PGTCEICAACTGC

SEQ ID NO: 613 - protein, 12 aa, Artificial Sequence
  Synthetically generated peptide
PGTCEICACTGC

SEQ ID NO: 614 - protein, 12 aa, Artificial Sequence
  Synthetically generated peptide
PGTCEICACTGC

SEQ ID NO: 615 - protein, 12 aa, Artificial Sequence
  Synthetically generated peptide
PGTCEICAACGC

SEQ ID NO: 616 - protein, 12 aa, Artificial Sequence
  Synthetically generated peptide
PGTCEICAACTC

SEQ ID NO: 617 - protein, 13 aa, Artificial Sequence
  Synthetically generated peptide
PGTCEICYACTGC

SEQ ID NO: 618 - protein, 12 aa, Artificial Sequence
  Synthetically generated peptide
PGTCEICYCTGC

SEQ ID NO: 619 - protein, 12 aa, Artificial Sequence
  Synthetically generated peptide
PGTCEICYACGC

SEQ ID NO: 620 - protein, 12 aa, Artificial Sequence
  Synthetically generated peptide
PGTCEICYACTC

SEQ ID NO: 621 - protein, 13 aa, Artificial Sequence
  Synthetically generated peptide
PGTCEICYACTGC

SEQ ID NO: 622 - protein, 12 aa, Artificial Sequence
  Synthetically generated peptide
PGTCEICYACGC

SEQ ID NO: 623 - protein, 12 aa, Artificial Sequence
  Synthetically generated peptide
PGTCEICYACTC

SEQ ID NO: 624 - protein, 13 aa, Artificial Sequence
  Synthetically generated peptide
PGTCEICYAACGC

SEQ ID NO: 625 - protein, 12 aa, Artificial Sequence
  Synthetically generated peptide
PGTCEICYAACC

SEQ ID NO: 626 - protein, 13 aa, Artificial Sequence
  Synthetically generated peptide
PGTCEICYAACTC

SEQ ID NO: 627 - protein, 14 aa, Artificial Sequence
  Synthetically generated peptide
PGTCEICAAACTGC

SEQ ID NO: 628 - protein, 13 aa, Artificial Sequence
  Synthetically generated peptide
PGTCEICAACTGC

SEQ ID NO: 629 - protein, 12 aa, Artificial Sequence
  Synthetically generated peptide
PGTCEICACTGC

SEQ ID NO: 630 - protein, 12 aa, Artificial Sequence
  Synthetically generated peptide
PGTCEICAACGC

SEQ ID NO: 631 - protein, 12 aa, Artificial Sequence
  Synthetically generated peptide
PGTCEICAACTC

SEQ ID NO: 632 - protein, 13 aa, Artificial Sequence
  Synthetically generated peptide
PGTCEICAACTGC

SEQ ID NO: 633 - protein, 12 aa, Artificial Sequence
  Synthetically generated peptide
PGTCEICAACGC

SEQ ID NO: 634 - protein, 12 aa, Artificial Sequence
  Synthetically generated peptide
PGTCEICAACTC

SEQ ID NO: 635 - protein, 13 aa, Artificial Sequence
  Synthetically generated peptide
PGTCEICAAACGC

SEQ ID NO: 636 - protein, 12 aa, Artificial Sequence
  Synthetically generated peptide
PGTCEICAAACC

SEQ ID NO: 637 - protein, 13 aa, Artificial Sequence
  Synthetically generated peptide
PGTCEICAAACTC

SEQ ID NO: 638 - protein, 14 aa, Artificial Sequence
  Synthetically generated peptide
PGTCEICAYACTGC

SEQ ID NO: 639 - protein, 13 aa, Artificial Sequence
  Synthetically generated peptide
PGTCEICAYCTGC

SEQ ID NO: 640 - protein, 12 aa, Artificial Sequence
  Synthetically generated peptide
PGTCEICAYCGC

SEQ ID NO: 641 - protein, 12 aa, Artificial Sequence
  Synthetically generated peptide
PGTCEICAYCTC

SEQ ID NO: 642 - protein, 13 aa, Artificial Sequence
  Synthetically generated peptide
PGTCEICAYACGC

SEQ ID NO: 643 - protein, 12 aa, Artificial Sequence
  Synthetically generated peptide
PGTCEICAYACC

SEQ ID NO: 644 - protein, 13 aa, Artificial Sequence
  Synthetically generated peptide
PGTCEICAYACTC

SEQ ID NO: 645 - protein, 14 aa, Artificial Sequence
  Synthetically generated peptide
PGTCEICAYACTGC

SEQ ID NO: 646 - protein, 13 aa, Artificial Sequence
  Synthetically generated peptide
PGTCEICAYACGC

SEQ ID NO: 647 - protein, 12 aa, Artificial Sequence
  Synthetically generated peptide
PGTCEICAYACC

SEQ ID NO: 648 - protein, 13 aa, Artificial Sequence
  Synthetically generated peptide
PGTCEICAYACTC

SEQ ID NO: 649 - protein, 14 aa, Artificial Sequence
  Synthetically generated peptide
PGTCEICAYAACGC

SEQ ID NO: 650 - protein, 13 aa, Artificial Sequence
  Synthetically generated peptide
PGTCEICAYAACC

SEQ ID NO: 651 - protein, 14 aa, Artificial Sequence
  Synthetically generated peptide
PGTCEICAYAACTC

SEQ ID NO: 652 - protein, 15 aa, Artificial Sequence [sequence omitted]

SEQ ID NO: 653 - protein, 14 aa, Artificial Sequence
  Synthetically generated peptide
PGTCGCAYAACTGC

SEQ ID NO: 654 - protein, 13 aa, Artificial Sequence
  Synthetically generated peptide
PGTCGCYAACTGC

SEQ ID NO: 655 - protein, 12 aa, Artificial Sequence
  Synthetically generated peptide
PGTCGCAACTGC

SEQ ID NO: 656 - protein, 12 aa, Artificial Sequence
  Synthetically generated peptide
PGTCGCYACTGC

SEQ ID NO: 657 - protein, 12 aa, Artificial Sequence
  Synthetically generated peptide
PGTCGCYACTGC

SEQ ID NO: 658 - protein, 12 aa, Artificial Sequence
  Synthetically generated peptide
PGTCGCYAACGC

SEQ ID NO: 659 - protein, 12 aa, Artificial Sequence
  Synthetically generated peptide
PGTCGCYAACTC

SEQ ID NO: 660 - protein, 13 aa, Artificial Sequence
  Synthetically generated peptide
PGTCGCAAACTGC

SEQ ID NO: 661 - protein, 12 aa, Artificial Sequence
  Synthetically generated peptide
PGTCGCAACTGC

SEQ ID NO: 662 - protein, 12 aa, Artificial Sequence
  Synthetically generated peptide
PGTCGCAACTGC

SEQ ID NO: 663 - protein, 12 aa, Artificial Sequence
  Synthetically generated peptide
PGTCGCAAACGC

SEQ ID NO: 664 - protein, 12 aa, Artificial Sequence
  Synthetically generated peptide
PGTCGCAAACTC

SEQ ID NO: 665 - protein, 13 aa, Artificial Sequence
  Synthetically generated peptide
PGTCGCAYACTGC

SEQ ID NO: 666 - protein, 12 aa, Artificial Sequence
  Synthetically generated peptide
PGTCGCAYCTGC

SEQ ID NO: 667 - protein, 12 aa, Artificial Sequence
  Synthetically generated peptide
PGTCGCAYACGC

SEQ ID NO: 668 - protein, 12 aa, Artificial Sequence
  Synthetically generated peptide
PGTCGCAYACTC

SEQ ID NO: 669 - protein, 13 aa, Artificial Sequence
  Synthetically generated peptide
PGTCGCAYACTGC

SEQ ID NO: 670 - protein, 12 aa, Artificial Sequence
  Synthetically generated peptide
PGTCGCAYACGC

SEQ ID NO: 671 - protein, 12 aa, Artificial Sequence
  Synthetically generated peptide
PGTCGCAYACTC

SEQ ID NO: 672 - protein, 13 aa, Artificial Sequence
  Synthetically generated peptide
PGTCGCAYAACGC

SEQ ID NO: 673 - protein, 12 aa, Artificial Sequence
  Synthetically generated peptide
PGTCGCAYAACC

SEQ ID NO: 674 - protein, 13 aa, Artificial Sequence
  Synthetically generated peptide
PGTCGCAYAACTC

SEQ ID NO: 675 - protein, 14 aa, Artificial Sequence
  Synthetically generated peptide
PGTCGICYAACTGC

SEQ ID NO: 676 - protein, 13 aa, Artificial Sequence
  Synthetically generated peptide
PGTCGICAACTGC

SEQ ID NO: 677 - protein, 12 aa, Artificial Sequence
  Synthetically generated peptide
PGTCGICACTGC

SEQ ID NO: 678 - protein, 12 aa, Artificial Sequence
  Synthetically generated peptide
PGTCGICACTGC

SEQ ID NO: 679 - protein, 12 aa, Artificial Sequence
  Synthetically generated peptide
PGTCGICAACGC

SEQ ID NO: 680 - protein, 12 aa, Artificial Sequence
  Synthetically generated peptide
PGTCGICAACTC

SEQ ID NO: 681 - protein, 13 aa, Artificial Sequence
  Synthetically generated peptide
PGTCGICYACTGC

SEQ ID NO: 682 - protein, 12 aa, Artificial Sequence
  Synthetically generated peptide
PGTCGICYCTGC

SEQ ID NO: 683 - protein, 12 aa, Artificial Sequence
  Synthetically generated peptide
PGTCGICYACGC

SEQ ID NO: 684 - protein, 12 aa, Artificial Sequence
  Synthetically generated peptide
PGTCGICYACTC

SEQ ID NO: 685 - protein, 13 aa, Artificial Sequence
  Synthetically generated peptide
PGTCGICYACTGC

SEQ ID NO: 686 - protein, 12 aa, Artificial Sequence
  Synthetically generated peptide
PGTCGICYACGC

SEQ ID NO: 687 - protein, 12 aa, Artificial Sequence
  Synthetically generated peptide
PGTCGICYACTC

SEQ ID NO: 688 - protein, 13 aa, Artificial Sequence
  Synthetically generated peptide
PGTCGICYAACGC

SEQ ID NO: 689 - protein, 12 aa, Artificial Sequence
  Synthetically generated peptide
PGTCGICYAACC

SEQ ID NO: 690 - protein, 13 aa, Artificial Sequence
  Synthetically generated peptide
PGTCGICYAACTC

SEQ ID NO: 691 - protein, 14 aa, Artificial Sequence
  Synthetically generated peptide
PGTCGICAAACTGC

SEQ ID NO: 692 - protein, 13 aa, Artificial Sequence
  Synthetically generated peptide
PGTCGICAACTGC

SEQ ID NO: 693 - protein, 12 aa, Artificial Sequence
  Synthetically generated peptide
PGTCGICACTGC

SEQ ID NO: 694 - protein, 12 aa, Artificial Sequence
  Synthetically generated peptide
PGTCGICAACGC

SEQ ID NO: 695 - protein, 12 aa, Artificial Sequence
  Synthetically generated peptide
PGTCGICAACTC

SEQ ID NO: 696 - protein, 13 aa, Artificial Sequence
  Synthetically generated peptide
PGTCGICAACTGC

SEQ ID NO: 697 - protein, 12 aa, Artificial Sequence
  Synthetically generated peptide
PGTCGICAACGC

SEQ ID NO: 698 - protein, 12 aa, Artificial Sequence
  Synthetically generated peptide
PGTCGICAACTC

SEQ ID NO: 699 - protein, 13 aa, Artificial Sequence
  Synthetically generated peptide
PGTCGICAAACGC

SEQ ID NO: 700 - protein, 12 aa, Artificial Sequence
  Synthetically generated peptide
PGTCGICAAACC

SEQ ID NO: 701 - protein, 13 aa, Artificial Sequence
  Synthetically generated peptide
PGTCGICAAACTC

SEQ ID NO: 702 - protein, 14 aa, Artificial Sequence
  Synthetically generated peptide
PGTCGICAYACTGC

SEQ ID NO: 703 - protein, 13 aa, Artificial Sequence
  Synthetically generated peptide
PGTCGICAYCTGC

SEQ ID NO: 704 - protein, 12 aa, Artificial Sequence
  Synthetically generated peptide
PGTCGICAYCGC

SEQ ID NO: 705 - protein, 12 aa, Artificial Sequence
  Synthetically generated peptide
PGTCGICAYCTC

SEQ ID NO: 706 - protein, 13 aa, Artificial Sequence
  Synthetically generated peptide
PGTCGICAYACGC

SEQ ID NO: 707 - protein, 12 aa, Artificial Sequence
  Synthetically generated peptide
PGTCGICAYACC

SEQ ID NO: 708 - protein, 13 aa, Artificial Sequence
  Synthetically generated peptide
PGTCGICAYACTC

SEQ ID NO: 709 - protein, 14 aa, Artificial Sequence
  Synthetically generated peptide
PGTCGICAYACTGC

SEQ ID NO: 710 - protein, 13 aa, Artificial Sequence
  Synthetically generated peptide
PGTCGICAYACGC

SEQ ID NO: 711 - protein, 12 aa, Artificial Sequence
  Synthetically generated peptide
PGTCGICAYACC

SEQ ID NO: 712 - protein, 13 aa, Artificial Sequence
  Synthetically generated peptide
PGTCGICAYACTC

SEQ ID NO: 713 - protein, 14 aa, Artificial Sequence
  Synthetically generated peptide
PGTCGICAYAACGC

SEQ ID NO: 714 - protein, 13 aa, Artificial Sequence
  Synthetically generated peptide
PGTCGICAYAACC

SEQ ID NO: 715 - protein, 14 aa, Artificial Sequence
  Synthetically generated peptide
PGTCGICAYAACTC

SEQ ID NO: 716 - protein, 15 aa, Artificial Sequence
  Synthetically generated peptide
PGTCGECAYAACTGC

SEQ ID NO: 717 - protein, 14 aa, Artificial Sequence
  Synthetically generated peptide
PGTCGECYAACTGC

SEQ ID NO: 718 - protein, 13 aa, Artificial Sequence
  Synthetically generated peptide
PGTCGECAACTGC

SEQ ID NO: 719 - protein, 12 aa, Artificial Sequence
  Synthetically generated peptide
PGTCGECACTGC

SEQ ID NO: 720 - protein, 12 aa, Artificial Sequence
  Synthetically generated peptide
PGTCGECACTGC

SEQ ID NO: 721 - protein, 12 aa, Artificial Sequence
  Synthetically generated peptide
PGTCGECAACGC

SEQ ID NO: 722 - protein, 12 aa, Artificial Sequence
  Synthetically generated peptide
PGTCGECAACTC

SEQ ID NO: 723 - protein, 13 aa, Artificial Sequence
  Synthetically generated peptide
PGTCGECYACTGC

SEQ ID NO: 724 - protein, 12 aa, Artificial Sequence
  Synthetically generated peptide
PGTCGECYCTGC

SEQ ID NO: 725 - protein, 12 aa, Artificial Sequence
  Synthetically generated peptide
PGTCGECYACGC

SEQ ID NO: 726 - protein, 12 aa, Artificial Sequence
  Synthetically generated peptide
PGTCGECYACTC

SEQ ID NO: 727 - protein, 13 aa, Artificial Sequence
  Synthetically generated peptide
PGTCGECYACTGC

SEQ ID NO: 728 - protein, 12 aa, Artificial Sequence
  Synthetically generated peptide
PGTCGECYACGC

SEQ ID NO: 729 - protein, 12 aa, Artificial Sequence
  Synthetically generated peptide
PGTCGECYACTC

SEQ ID NO: 730 - protein, 13 aa, Artificial Sequence
  Synthetically generated peptide
PGTCGECYAACGC

SEQ ID NO: 731 - protein, 12 aa, Artificial Sequence
  Synthetically generated peptide
PGTCGECYAACC

SEQ ID NO: 732 - protein, 13 aa, Artificial Sequence
  Synthetically generated peptide
PGTCGECYAACTC

SEQ ID NO: 733 - protein, 14 aa, Artificial Sequence
  Synthetically generated peptide
PGTCGECAAACTGC

SEQ ID NO: 734 - protein, 13 aa, Artificial Sequence
  Synthetically generated peptide
PGTCGECAACTGC

SEQ ID NO: 735 - protein, 12 aa, Artificial Sequence
  Synthetically generated peptide
PGTCGECACTGC

SEQ ID NO: 736 - protein, 12 aa, Artificial Sequence
  Synthetically generated peptide
PGTCGECAACGC

SEQ ID NO: 737 - protein, 12 aa, Artificial Sequence
  Synthetically generated peptide
PGTCGECAACTC

SEQ ID NO: 738 - protein, 13 aa, Artificial Sequence
  Synthetically generated peptide
PGTCGECAACTGC

SEQ ID NO: 739 - protein, 12 aa, Artificial Sequence
  Synthetically generated peptide
PGTCGECAACGC

SEQ ID NO: 740 - protein, 12 aa, Artificial Sequence
  Synthetically generated peptide
PGTCGECAACTC

SEQ ID NO: 741 - protein, 13 aa, Artificial Sequence
  Synthetically generated peptide
PGTCGECAAACGC

SEQ ID NO: 742 - protein, 12 aa, Artificial Sequence
  Synthetically generated peptide
PGTCGECAAACC

SEQ ID NO: 743 - protein, 13 aa, Artificial Sequence
  Synthetically generated peptide
PGTCGECAAACTC

SEQ ID NO: 744 - protein, 14 aa, Artificial Sequence
  Synthetically generated peptide
PGTCGECAYACTGC

SEQ ID NO: 745 - protein, 13 aa, Artificial Sequence
  Synthetically generated peptide
PGTCGECAYCTGC

SEQ ID NO: 746 - protein, 12 aa, Artificial Sequence
  Synthetically generated peptide
PGTCGECAYCGC

SEQ ID NO: 747 - protein, 12 aa, Artificial Sequence
  Synthetically generated peptide
PGTCGECAYCTC

SEQ ID NO: 748 - protein, 13 aa, Artificial Sequence
  Synthetically generated peptide
PGTCGECAYACGC

SEQ ID NO: 749 - protein, 12 aa, Artificial Sequence
  Synthetically generated peptide
PGTCGECAYACC

SEQ ID NO: 750 - protein, 13 aa, Artificial Sequence
  Synthetically generated peptide
PGTCGECAYACTC

SEQ ID NO: 751 - protein, 14 aa, Artificial Sequence
  Synthetically generated peptide
PGTCGECAYACTGC

SEQ ID NO: 752 - protein, 13 aa, Artificial Sequence
  Synthetically generated peptide
PGTCGECAYACGC

SEQ ID NO: 753 - protein, 12 aa, Artificial Sequence
  Synthetically generated peptide
PGTCGECAYACC

SEQ ID NO: 754 - protein, 13 aa, Artificial Sequence
  Synthetically generated peptide
PGTCGECAYACTC

SEQ ID NO: 755 - protein, 14 aa, Artificial Sequence
  Synthetically generated peptide
PGTCGECAYAACGC

SEQ ID NO: 756 - protein, 13 aa, Artificial Sequence
  Synthetically generated peptide
PGTCGECAYAACC

SEQ ID NO: 757 - protein, 14 aa, Artificial Sequence
  Synthetically generated peptide
PGTCGECAYAACTC

SEQ ID NO: 758 - protein, 15 aa, Artificial Sequence
  Synthetically generated peptide
PGTCGEICYAACTGC

SEQ ID NO: 759 - protein, 14 aa, Artificial Sequence
  Synthetically generated peptide
PGTCGEICAACTGC

SEQ ID NO: 760 - protein, 13 aa, Artificial Sequence
  Synthetically generated peptide
PGTCGEICACTGC

SEQ ID NO: 761 - protein, 12 aa, Artificial Sequence
  Synthetically generated peptide
PGTCGEICCTGC

SEQ ID NO: 762 - protein, 12 aa, Artificial Sequence
  Synthetically generated peptide
PGTCGEICACGC

SEQ ID NO: 763 - protein, 12 aa, Artificial Sequence
  Synthetically generated peptide
PGTCGEICACTC

SEQ ID NO: 764 - protein, 13 aa, Artificial Sequence
  Synthetically generated peptide
PGTCGEICACTGC

SEQ ID NO: 765 - protein, 12 aa, Artificial Sequence
  Synthetically generated peptide
PGTCGEICACGC

SEQ ID NO: 766 - protein, 12 aa, Artificial Sequence
  Synthetically generated peptide
PGTCGEICACTC

SEQ ID NO: 767 - protein, 13 aa, Artificial Sequence
  Synthetically generated peptide
PGTCGEICAACGC

SEQ ID NO: 768 - protein, 12 aa, Artificial Sequence
  Synthetically generated peptide
PGTCGEICAACC

SEQ ID NO: 769 - protein, 13 aa, Artificial Sequence
  Synthetically generated peptide
PGTCGEICAACTC

SEQ ID NO: 770 - protein, 14 aa, Artificial Sequence
  Synthetically generated peptide
PGTCGEICYACTGC

SEQ ID NO: 771 - protein, 13 aa, Artificial Sequence
  Synthetically generated peptide
PGTCGEICYCTGC

SEQ ID NO: 772 - protein, 12 aa, Artificial Sequence
  Synthetically generated peptide
PGTCGEICYCGC

SEQ ID NO: 773 - protein, 12 aa, Artificial Sequence
  Synthetically generated peptide
PGTCGEICYCTC

SEQ ID NO: 774 - protein, 13 aa, Artificial Sequence
  Synthetically generated peptide
PGTCGEICYACGC

SEQ ID NO: 775 - protein, 12 aa, Artificial Sequence
  Synthetically generated peptide
PGTCGEICYACC

SEQ ID NO: 776 - protein, 13 aa, Artificial Sequence
  Synthetically generated peptide
PGTCGEICYACTC

SEQ ID NO: 777 - protein, 14 aa, Artificial Sequence
  Synthetically generated peptide
PGTCGEICYACTGC

SEQ ID NO: 778 - protein, 13 aa, Artificial Sequence
  Synthetically generated peptide
PGTCGEICYACGC

SEQ ID NO: 779 - protein, 12 aa, Artificial Sequence
  Synthetically generated peptide
PGTCGEICYACC

SEQ ID NO: 780 - protein, 13 aa, Artificial Sequence
  Synthetically generated peptide
PGTCGEICYACTC

SEQ ID NO: 781 - protein, 14 aa, Artificial Sequence
  Synthetically generated peptide
PGTCGEICYAACGC

SEQ ID NO: 782 - protein, 13 aa, Artificial Sequence
  Synthetically generated peptide
PGTCGEICYAACC

SEQ ID NO: 783 - protein, 14 aa, Artificial Sequence
  Synthetically generated peptide
PGTCGEICYAACTC

SEQ ID NO: 784 - protein, 15 aa, Artificial Sequence
  Synthetically generated peptide
PGTCGEICAAACTGC

SEQ ID NO: 785 - protein, 14 aa, Artificial Sequence
  Synthetically generated peptide
PGTCGEICAACTGC

SEQ ID NO: 786 - protein, 13 aa, Artificial Sequence
  Synthetically generated peptide
PGTCGEICACTGC

SEQ ID NO: 787 - protein, 12 aa, Artificial Sequence
  Synthetically generated peptide
PGTCGEICACGC

SEQ ID NO: 788 - protein, 12 aa, Artificial Sequence
  Synthetically generated peptide
PGTCGEICACTC

SEQ ID NO: 789 - protein, 13 aa, Artificial Sequence
  Synthetically generated peptide
PGTCGEICAACGC

SEQ ID NO: 790 - protein, 12 aa, Artificial Sequence
  Synthetically generated peptide
PGTCGEICAACC

SEQ ID NO: 791 - protein, 13 aa, Artificial Sequence
  Synthetically generated peptide
PGTCGEICAACTC

SEQ ID NO: 792 - protein, 14 aa, Artificial Sequence
  Synthetically generated peptide
PGTCGEICAACTGC

SEQ ID NO: 793 - protein, 13 aa, Artificial Sequence
  Synthetically generated peptide
PGTCGEICAACGC

SEQ ID NO: 794 - protein, 12 aa, Artificial Sequence
  Synthetically generated peptide
PGTCGEICAACC

SEQ ID NO: 795 - protein, 13 aa, Artificial Sequence
  Synthetically generated peptide
PGTCGEICAACTC

SEQ ID NO: 796 - protein, 14 aa, Artificial Sequence
  Synthetically generated peptide
PGTCGEICAAACGC

SEQ ID NO: 797 - protein, 13 aa, Artificial Sequence
  Synthetically generated peptide
PGTCGEICAAACC

SEQ ID NO: 798 - protein, 14 aa, Artificial Sequence
  Synthetically generated peptide
PGTCGEICAAACTC

SEQ ID NO: 799 - protein, 15 aa, Artificial Sequence
  Synthetically generated peptide
PGTCGEICAYACTGC

SEQ ID NO: 800 - protein, 14 aa, Artificial Sequence
  Synthetically generated peptide
PGTCGEICAYCTGC

SEQ ID NO: 801 - protein, 13 aa, Artificial Sequence
  Synthetically generated peptide
PGTCGEICAYCGC

SEQ ID NO: 802 - protein, 12 aa, Artificial Sequence
  Synthetically generated peptide
PGTCGEICAYCC

SEQ ID NO: 803 - protein, 13 aa, Artificial Sequence
  Synthetically generated peptide
PGTCGEICAYCTC

SEQ ID NO: 804 - protein, 14 aa, Artificial Sequence
  Synthetically generated peptide
PGTCGEICAYACGC

SEQ ID NO: 805 - protein, 13 aa, Artificial Sequence
  Synthetically generated peptide
PGTCGEICAYACC

SEQ ID NO: 806 - protein, 14 aa, Artificial Sequence
  Synthetically generated peptide
PGTCGEICAYACTC

SEQ ID NO: 807 - protein, 15 aa, Artificial Sequence
  Synthetically generated peptide
PGTCGEICAYACTGC

SEQ ID NO: 808 - protein, 14 aa, Artificial Sequence
  Synthetically generated peptide
PGTCGEICAYACGC

SEQ ID NO: 809 - protein, 13 aa, Artificial Sequence
  Synthetically generated peptide
PGTCGEICAYACC

SEQ ID NO: 810 - protein, 14 aa, Artificial Sequence
  Synthetically generated peptide
PGTCGEICAYACTC

SEQ ID NO: 811 - protein, 15 aa, Artificial Sequence
  Synthetically generated peptide
PGTCGEICAYAACGC

SEQ ID NO: 812 - protein, 14 aa, Artificial Sequence
  Synthetically generated peptide
PGTCGEICAYAACC

SEQ ID NO: 813 - protein, 15 aa, Artificial Sequence
  Synthetically generated peptide
PGTCGEICAYAACTC

SEQ ID NO: 814 - protein, 17 aa, Artificial Sequence
  Synthetically generated peptide
  VARIANT (1)...(17): Xaa = Any Amino Acid
PGXTCGEICAYAACTGC

SEQ ID NO: 815 - protein, 18 aa, Artificial Sequence
  Synthetically generated peptide
  VARIANT (1)...(18): Xaa = Any Amino Acid
PGXXTCGEICAYAACTGC

SEQ ID NO: 816 - protein, 19 aa, Artificial Sequence
  Synthetically generated peptide
  VARIANT (1)...(19): Xaa = Any Amino Acid
PGXXXTCGEICAYAACTGC

SEQ ID NO: 817 - protein, 20 aa, Artificial Sequence
  Synthetically generated peptide
  VARIANT (1)...(20): Xaa = Any Amino Acid
PGXXXXTCGEICAYAACTGC

SEQ ID NO: 818 - protein, 20 aa, Artificial Sequence
  Synthetically generated peptide
  VARIANT (1)...(20): Xaa = Any Amino Acid
PGXXXTXCGEICAYAACTGC

SEQ ID NO: 819 - protein, 20 aa, Artificial Sequence
  Synthetically generated peptide
  VARIANT (1)...(20): Xaa = Any Amino Acid
PGXXXTCXGEICAYAACTGC

SEQ ID NO: 820 - protein, 20 aa, Artificial Sequence
  Synthetically generated peptide
  VARIANT (1)...(20): Xaa = Any Amino Acid
PGXXXTCGXEICAYAACTGC

SEQ ID NO: 821 - protein, 20 aa, Artificial Sequence
  Synthetically generated peptide
  VARIANT (1)...(20): Xaa = Any Amino Acid
PGXXXTCGEXICAYAACTGC

SEQ ID NO: 822 - protein, 20 aa, Artificial Sequence
  Synthetically generated peptide
  VARIANT (1)...(20): Xaa = Any Amino Acid
PGXXXTCGEIXCAYAACTGC

SEQ ID NO: 823 - protein, 20 aa, Artificial Sequence
  Synthetically generated peptide
  VARIANT (1)...(20): Xaa = Any Amino Acid
PGXXXTCGEICXAYAACTGC

SEQ ID NO: 824 - protein, 20 aa, Artificial Sequence
  Synthetically generated peptide
  VARIANT (1)...(20): Xaa = Any Amino Acid
PGXXXTCGEICAXYAACTGC

SEQ ID NO: 825 - protein, 20 aa, Artificial Sequence
  Synthetically generated peptide
  VARIANT (1)...(20): Xaa = Any Amino Acid
PGXXXTCGEICAYXAACTGC

SEQ ID NO: 826 - protein, 20 aa, Artificial Sequence
  Synthetically generated peptide
  VARIANT (1)...(20): Xaa = Any Amino Acid
PGXXXTCGEICAYAXACTGC

SEQ ID NO: 827 - protein, 20 aa, Artificial Sequence
  Synthetically generated peptide
  VARIANT (1)...(20): Xaa = Any Amino Acid
PGXXXTCGEICAYAAXCTGC

SEQ ID NO: 828 - protein, 20 aa, Artificial Sequence
  Synthetically generated peptide
  VARIANT (1)...(20): Xaa = Any Amino Acid
PGXXXTCGEICAYAACXTGC

SEQ ID NO: 829 - protein, 20 aa, Artificial Sequence
  Synthetically generated peptide
  VARIANT (1)...(20): Xaa = Any Amino Acid
PGXXXTCGEICAYAACTXGC

SEQ ID NO: 830 - protein, 20 aa, Artificial Sequence
  Synthetically generated peptide
  VARIANT (1)...(20): Xaa = Any Amino Acid
PGXXXTCGEICAYAACTGXC

SEQ ID NO: 831 - protein, 20 aa, Artificial Sequence
  Synthetically generated peptide
  VARIANT (1)...(20): Xaa = Any Amino Acid
PGXXXTCGEICAYAACTGCX

SEQ ID NO: 832 - protein, 19 aa, Artificial Sequence
  Synthetically generated peptide
  VARIANT (1)...(19): Xaa = Any Amino Acid
PGXXTXCGEICAYAACTGC

SEQ ID NO: 833 - protein, 20 aa, Artificial Sequence
  Synthetically generated peptide
  VARIANT (1)...(20): Xaa = Any Amino Acid
PGXXTXXCGEICAYAACTGC

SEQ ID NO: 834 - protein, 20 aa, Artificial Sequence
  Synthetically generated peptide
  VARIANT (1)...(20): Xaa = Any Amino Acid
PGXXTXCXGEICAYAACTGC

SEQ ID NO: 835 - protein, 20 aa, Artificial Sequence
  Synthetically generated peptide
  VARIANT (1)...(20): Xaa = Any Amino Acid
PGXXTXCGXEICAYAACTGC

SEQ ID NO: 836 - protein, 20 aa, Artificial Sequence
  Synthetically generated peptide
  VARIANT (1)...(20): Xaa = Any Amino Acid
PGXXTXCGEXICAYAACTGC

SEQ ID NO: 837 - protein, 20 aa, Artificial Sequence
  Synthetically generated peptide
  VARIANT (1)...(20): Xaa = Any Amino Acid
PGXXTXCGEIXCAYAACTGC

SEQ ID NO: 838 - protein, 20 aa, Artificial Sequence
  Synthetically generated peptide
  VARIANT (1)...(20): Xaa = Any Amino Acid
PGXXTXCGEICXAYAACTGC

SEQ ID NO: 839 - protein, 20 aa, Artificial Sequence
  Synthetically generated peptide
  VARIANT (1)...(20): Xaa = Any Amino Acid
PGXXTXCGEICAXYAACTGC

SEQ ID NO: 840 - protein, 20 aa, Artificial Sequence
  Synthetically generated peptide
  VARIANT (1)...(20): Xaa = Any Amino Acid
PGXXTXCGEICAYXAACTGC

SEQ ID NO: 841 - protein, 20 aa, Artificial Sequence
  Synthetically generated peptide
  VARIANT (1)...(20): Xaa = Any Amino Acid
PGXXTXCGEICAYAXACTGC

SEQ ID NO: 842 - protein, 20 aa, Artificial Sequence
  Synthetically generated peptide
  VARIANT (1)...(20): Xaa = Any Amino Acid
PGXXTXCGEICAYAAXCTGC

SEQ ID NO: 843 - protein, 20 aa, Artificial Sequence
  Synthetically generated peptide
  VARIANT (1)...(20): Xaa = Any Amino Acid
PGXXTXCGEICAYAACXTGC

SEQ ID NO: 844 - protein, 20 aa, Artificial Sequence
  Synthetically generated peptide
  VARIANT (1)...(20): Xaa = Any Amino Acid
PGXXTXCGEICAYAACTXGC

SEQ ID NO: 845 - protein, 20 aa, Artificial Sequence
  Synthetically generated peptide
  VARIANT (1)...(20): Xaa = Any Amino Acid
PGXXTXCGEICAYAACTGXC

SEQ ID NO: 846 - protein, 20 aa, Artificial Sequence
  Synthetically generated peptide
  VARIANT (1)...(20): Xaa = Any Amino Acid
PGXXTXCGEICAYAACTGCX

SEQ ID NO: 847 - protein, 19 aa, Artificial Sequence
  Synthetically generated peptide
  VARIANT (1)...(19): Xaa = Any Amino Acid
PGXXTCXGEICAYAACTGC

SEQ ID NO: 848 - protein, 20 aa, Artificial Sequence
  Synthetically generated peptide
  VARIANT (1)...(20): Xaa = Any Amino Acid
PGXXTCXXGEICAYAACTGC

SEQ ID NO: 849 - protein, 20 aa, Artificial Sequence
  Synthetically generated peptide
  VARIANT (1)...(20): Xaa = Any Amino Acid
PGXXTCXGXEICAYAACTGC

SEQ ID NO: 850 - protein, 20 aa, Artificial Sequence
  Synthetically generated peptide
  VARIANT (1)...(20): Xaa = Any Amino Acid
PGXXTCXGEXICAYAACTGC

SEQ ID NO: 851 - protein, 20 aa, Artificial Sequence
  Synthetically generated peptide
  VARIANT (1)...(20): Xaa = Any Amino Acid
PGXXTCXGEIXCAYAACTGC

SEQ ID NO: 852 - protein, 20 aa, Artificial Sequence
  Synthetically generated peptide
  VARIANT (1)...(20): Xaa = Any Amino Acid
PGXXTCXGEICXAYAACTGC

SEQ ID NO: 853 - protein, 20 aa, Artificial Sequence
  Synthetically generated peptide
  VARIANT (1)...(20): Xaa = Any Amino Acid
PGXXTCXGEICAXYAACTGC

SEQ ID NO: 854 - protein, 20 aa, Artificial Sequence
  Synthetically generated peptide
  VARIANT (1)...(20): Xaa = Any Amino Acid
PGXXTCXGEICAYXAACTGC

SEQ ID NO: 855 - protein, 20 aa, Artificial Sequence
  Synthetically generated peptide
  VARIANT (1)...(20): Xaa = Any Amino Acid
PGXXTCXGEICAYAXACTGC

SEQ ID NO: 856 - protein, 20 aa, Artificial Sequence
  Synthetically generated peptide
  VARIANT (1)...(20): Xaa = Any Amino Acid
PGXXTCXGEICAYAAXCTGC

SEQ ID NO: 857 - protein, 20 aa, Artificial Sequence
  Synthetically generated peptide
  VARIANT (1)...(20): Xaa = Any Amino Acid
PGXXTCXGEICAYAACXTGC

SEQ ID NO: 858 - protein, 20 aa, Artificial Sequence
  Synthetically generated peptide
  VARIANT (1)...(20): Xaa = Any Amino Acid
PGXXTCXGEICAYAACTXGC

SEQ ID NO: 859 - protein, 20 aa, Artificial Sequence
  Synthetically generated peptide
  VARIANT (1)...(20): Xaa = Any Amino Acid
PGXXTCXGEICAYAACTGXC

SEQ ID NO: 860 - protein, 20 aa, Artificial Sequence
  Synthetically generated peptide
  VARIANT (1)...(20): Xaa = Any Amino Acid
PGXXTCXGEICAYAACTGCX

SEQ ID NO: 861 - protein, 19 aa, Artificial Sequence
  Synthetically generated peptide
  VARIANT (1)...(19): Xaa = Any Amino Acid
PGXXTCGXEICAYAACTGC

SEQ ID NO: 862 - protein, 20 aa, Artificial Sequence
  Synthetically generated peptide
  VARIANT (1)...(20): Xaa = Any Amino Acid
PGXXTCGXXEICAYAACTGC

SEQ ID NO: 863 - protein, 20 aa, Artificial Sequence
  Synthetically generated peptide
  VARIANT (1)...(20): Xaa = Any Amino Acid
PGXXTCGXEXICAYAACTGC

SEQ ID NO: 864 - protein, 20 aa, Artificial Sequence
  Synthetically generated peptide
  VARIANT (1)...(20): Xaa = Any Amino Acid
PGXXTCGXEIXCAYAACTGC

SEQ ID NO: 865 - protein, 20 aa, Artificial Sequence
  Synthetically generated peptide
  VARIANT (1)...(20): Xaa = Any Amino Acid
PGXXTCGXEICXAYAACTGC

SEQ ID NO: 866 - protein, 20 aa, Artificial Sequence
  Synthetically generated peptide
  VARIANT (1)...(20): Xaa = Any Amino Acid
PGXXTCGXEICAXYAACTGC

SEQ ID NO: 867 - protein, 20 aa, Artificial Sequence
  Synthetically generated peptide
  VARIANT (1)...(20): Xaa = Any Amino Acid
PGXXTCGXEICAYXAACTGC

SEQ ID NO: 868 - protein, 20 aa, Artificial Sequence
  Synthetically generated peptide
  VARIANT (1)...(20): Xaa = Any Amino Acid
PGXXTCGXEICAYAXACTGC

SEQ ID NO: 869 - protein, 20 aa, Artificial Sequence
  Synthetically generated peptide
  VARIANT (1)...(20): Xaa = Any Amino Acid
PGXXTCGXEICAYAAXCTGC

SEQ ID NO: 870 - protein, 20 aa, Artificial Sequence
  Synthetically generated peptide
  VARIANT (1)...(20): Xaa = Any Amino Acid
PGXXTCGXEICAYAACXTGC

SEQ ID NO: 871 - protein, 20 aa, Artificial Sequence
  Synthetically generated peptide
  VARIANT (1)...(20): Xaa = Any Amino Acid
PGXXTCGXEICAYAACTXGC

SEQ ID NO: 872 - protein, 20 aa, Artificial Sequence
  Synthetically generated peptide
  VARIANT (1)...(20): Xaa = Any Amino Acid
PGXXTCGXEICAYAACTGXC

SEQ ID NO: 873 - protein, 20 aa, Artificial Sequence
  Synthetically generated peptide
  VARIANT (1)...(20): Xaa = Any Amino Acid
PGXXTCGXEICAYAACTGCX

SEQ ID NO: 874 - protein, 19 aa, Artificial Sequence
  Synthetically generated peptide
  VARIANT (1)...(19): Xaa = Any Amino Acid
PGXXTCGEXICAYAACTGC

SEQ ID NO: 875 - protein, 20 aa, Artificial Sequence
  Synthetically generated peptide
  VARIANT (1)...(20): Xaa = Any Amino Acid
PGXXTCGEXXICAYAACTGC

SEQ ID NO: 876 - protein, 20 aa, Artificial Sequence
  Synthetically generated peptide
  VARIANT (1)...(20): Xaa = Any Amino Acid
PGXXTCGEXIXCAYAACTGC

SEQ ID NO: 877 - protein, 20 aa, Artificial Sequence
  Synthetically generated peptide
  VARIANT (1)...(20): Xaa = Any Amino Acid
PGXXTCGEXICXAYAACTGC

SEQ ID NO: 878 - protein, 20 aa, Artificial Sequence
  Synthetically generated peptide
  VARIANT (1)...(20): Xaa = Any Amino Acid
PGXXTCGEXICAXYAACTGC

SEQ ID NO: 879 - protein, 20 aa, Artificial Sequence
  Synthetically generated peptide
  VARIANT (1)...(20): Xaa = Any Amino Acid
PGXXTCGEXICAYXAACTGC

SEQ ID NO: 880 - protein, 20 aa, Artificial Sequence
  Synthetically generated peptide
  VARIANT (1)...(20): Xaa = Any Amino Acid
PGXXTCGEXICAYAXACTGC

SEQ ID NO: 881 - protein, 20 aa, Artificial Sequence
  Synthetically generated peptide
  VARIANT (1)...(20): Xaa = Any Amino Acid
PGXXTCGEXICAYAAXCTGC

SEQ ID NO: 882 - protein, 20 aa, Artificial Sequence
  Synthetically generated peptide
  VARIANT (1)...(20): Xaa = Any Amino Acid
PGXXTCGEXICAYAACXTGC

SEQ ID NO: 883 - protein, 20 aa, Artificial Sequence
  Synthetically generated peptide
  VARIANT (1)...(20): Xaa = Any Amino Acid
PGXXTCGEXICAYAACTXGC

SEQ ID NO: 884 - protein, 20 aa, Artificial Sequence
  Synthetically generated peptide
  VARIANT (1)...(20): Xaa = Any Amino Acid
PGXXTCGEXICAYAACTGXC

SEQ ID NO: 885 - protein, 20 aa, Artificial Sequence
  Synthetically generated peptide
  VARIANT (1)...(20): Xaa = Any Amino Acid
PGXXTCGEXICAYAACTGCX

SEQ ID NO: 886 - protein, 19 aa, Artificial Sequence
  Synthetically generated peptide
  VARIANT (1)...(19): Xaa = Any Amino Acid
PGXXTCGEIXCAYAACTGC

SEQ ID NO: 887 - protein, 20 aa, Artificial Sequence
  Synthetically generated peptide
  VARIANT (1)...(20): Xaa = Any Amino Acid
PGXXTCGEIXXCAYAACTGC

SEQ ID NO: 888 - protein, 20 aa, Artificial Sequence
  Synthetically generated peptide
  VARIANT (1)...(20): Xaa = Any Amino Acid
PGXXTCGEIXCXAYAACTGC

SEQ ID NO: 889 - protein, 20 aa, Artificial Sequence
  Synthetically generated peptide
  VARIANT (1)...(20): Xaa = Any Amino Acid
PGXXTCGEIXCAXYAACTGC

SEQ ID NO: 890 - protein, 20 aa, Artificial Sequence
  Synthetically generated peptide
  VARIANT (1)...(20): Xaa = Any Amino Acid
PGXXTCGEIXCAYXAACTGC

SEQ ID NO: 891 - protein, 20 aa, Artificial Sequence
  Synthetically generated peptide
  VARIANT (1)...(20): Xaa = Any Amino Acid
PGXXTCGEIXCAYAXACTGC

SEQ ID NO: 892 - protein, 20 aa, Artificial Sequence
  Synthetically generated peptide
  VARIANT (1)...(20): Xaa = Any Amino Acid
PGXXTCGEIXCAYAAXCTGC

SEQ ID NO: 893 - protein, 20 aa, Artificial Sequence
  Synthetically generated peptide
  VARIANT (1)...(20): Xaa = Any Amino Acid
PGXXTCGEIXCAYAACXTGC

SEQ ID NO: 894 - protein, 20 aa, Artificial Sequence
  Synthetically generated peptide
  VARIANT (1)...(20): Xaa = Any Amino Acid
PGXXTCGEIXCAYAACTXGC

SEQ ID NO: 895 - protein, 20 aa, Artificial Sequence
  Synthetically generated peptide
  VARIANT (1)...(20): Xaa = Any Amino Acid
PGXXTCGEIXCAYAACTGXC

SEQ ID NO: 896 - protein, 20 aa, Artificial Sequence
  Synthetically generated peptide
  VARIANT (1)...(20): Xaa = Any Amino Acid
PGXXTCGEIXCAYAACTGCX

SEQ ID NO: 897 - protein, 19 aa, Artificial Sequence
  Synthetically generated peptide
  VARIANT (1)...(19): Xaa = Any Amino Acid
PGXXTCGEICXAYAACTGC

SEQ ID NO: 898 - protein, 20 aa, Artificial Sequence
  Synthetically generated peptide
  VARIANT (1)...(20): Xaa = Any Amino Acid
PGXXTCGEICXXAYAACTGC

SEQ ID NO: 899 - protein, 20 aa, Artificial Sequence
  Synthetically generated peptide
  VARIANT (1)...(20): Xaa = Any Amino Acid
PGXXTCGEICXAXYAACTGC

SEQ ID NO: 900 - protein, 20 aa, Artificial Sequence
  Synthetically generated peptide
  VARIANT (1)...(20): Xaa = Any Amino Acid
PGXXTCGEICXAYXAACTGC

SEQ ID NO: 901 - protein, 20 aa, Artificial Sequence
  Synthetically generated peptide
  VARIANT (1)...(20): Xaa = Any Amino Acid
PGXXTCGEICXAYAXACTGC

SEQ ID NO: 902 - protein, 20 aa, Artificial Sequence
  Synthetically generated peptide
  VARIANT (1)...(20): Xaa = Any Amino Acid
PGXXTCGEICXAYAAXCTGC

SEQ ID NO: 903 - protein, 20 aa, Artificial Sequence
  Synthetically generated peptide
  VARIANT (1)...(20): Xaa = Any Amino Acid
PGXXTCGEICXAYAACXTGC

SEQ ID NO: 904 - protein, 20 aa, Artificial Sequence
  Synthetically generated peptide
  VARIANT (1)...(20): Xaa = Any Amino Acid
PGXXTCGEICXAYAACTXGC

SEQ ID NO: 905 - protein, 20 aa, Artificial Sequence
  Synthetically generated peptide
  VARIANT (1)...(20): Xaa = Any Amino Acid
PGXXTCGEICXAYAACTGXC

SEQ ID NO: 906 - protein, 20 aa, Artificial Sequence
  Synthetically generated peptide
  VARIANT (1)...(20): Xaa = Any Amino Acid
PGXXTCGEICXAYAACTGCX

SEQ ID NO: 907 - protein, 19 aa, Artificial Sequence
  Synthetically generated peptide
  VARIANT (1)...(19): Xaa = Any Amino Acid
PGXXTCGEICAXYAACTGC

SEQ ID NO: 908 - protein, 20 aa, Artificial Sequence
  Synthetically generated peptide
  VARIANT (1)...(20): Xaa = Any Amino Acid
PGXXTCGEICAXXYAACTGC

SEQ ID NO: 909 - protein, 20 aa, Artificial Sequence
  Synthetically generated peptide
  VARIANT (1)...(20): Xaa = Any Amino Acid
PGXXTCGEICAXYXAACTGC

SEQ ID NO: 910 - protein, 20 aa, Artificial Sequence
  Synthetically generated peptide
  VARIANT (1)...(20): Xaa = Any Amino Acid
PGXXTCGEICAXYAXACTGC

SEQ ID NO: 911 - protein, 20 aa, Artificial Sequence
  Synthetically generated peptide
  VARIANT (1)...(20): Xaa = Any Amino Acid
PGXXTCGEICAXYAAXCTGC

SEQ ID NO: 912 - protein, 20 aa, Artificial Sequence
  Synthetically generated peptide
  VARIANT (1)...(20): Xaa = Any Amino Acid
PGXXTCGEICAXYAACXTGC

SEQ ID NO: 913 - protein, 20 aa, Artificial Sequence
  Synthetically generated peptide
  VARIANT (1)...(20): Xaa = Any Amino Acid
PGXXTCGEICAXYAACTXGC

SEQ ID NO: 914 - protein, 20 aa, Artificial Sequence
  Synthetically generated peptide
  VARIANT (1)...(20): Xaa = Any Amino Acid
PGXXTCGEICAXYAACTGXC

SEQ ID NO: 915 - protein, 20 aa, Artificial Sequence
  Synthetically generated peptide
  VARIANT (1)...(20): Xaa = Any Amino Acid
PGXXTCGEICAXYAACTGCX

SEQ ID NO: 916 - protein, 19 aa, Artificial Sequence
  Synthetically generated peptide
  VARIANT (1)...(19): Xaa = Any Amino Acid
PGXXTCGEICAYXAACTGC

SEQ ID NO: 917 - protein, 20 aa, Artificial Sequence
  Synthetically generated peptide
  VARIANT (1)...(20): Xaa = Any Amino Acid
PGXXTCGEICAYXXAACTGC

SEQ ID NO: 918 - protein, 20 aa, Artificial Sequence
  Synthetically generated peptide
  VARIANT (1)...(20): Xaa = Any Amino Acid
PGXXTCGEICAYXAXACTGC

SEQ ID NO: 919 - protein, 20 aa, Artificial Sequence
  Synthetically generated peptide
  VARIANT (1)...(20): Xaa = Any Amino Acid
PGXXTCGEICAYXAAXCTGC

SEQ ID NO: 920 - protein, 20 aa, Artificial Sequence
  Synthetically generated peptide
  VARIANT (1)...(20): Xaa = Any Amino Acid
PGXXTCGEICAYXAACXTGC

SEQ ID NO: 921 - protein, 20 aa, Artificial Sequence
  Synthetically generated peptide
  VARIANT (1)...(20): Xaa = Any Amino Acid
PGXXTCGEICAYXAACTXGC

SEQ ID NO: 922 - protein, 20 aa, Artificial Sequence
  Synthetically generated peptide
  VARIANT (1)...(20): Xaa = Any Amino Acid
PGXXTCGEICAYXAACTGXC

SEQ ID NO: 923 - protein, 20 aa, Artificial Sequence
  Synthetically generated peptide
  VARIANT (1)...(20): Xaa = Any Amino Acid
PGXXTCGEICAYXAACTGCX

SEQ ID NO: 924 - protein, 19 aa, Artificial Sequence
  Synthetically generated peptide
  VARIANT (1)...(19): Xaa = Any Amino Acid
PGXXTCGEICAYAXACTGC

SEQ ID NO: 925 - protein, 20 aa, Artificial Sequence
  Synthetically generated peptide
  VARIANT (1)...(20): Xaa = Any Amino Acid
PGXXTCGEICAYAXXACTGC

SEQ ID NO: 926 - protein, 20 aa, Artificial Sequence
  Synthetically generated peptide
  VARIANT (1)...(20): Xaa = Any Amino Acid
PGXXTCGEICAYAXAXCTGC

SEQ ID NO: 927 - protein, 20 aa, Artificial Sequence
  Synthetically generated peptide
  VARIANT (1)...(20): Xaa = Any Amino Acid
PGXXTCGEICAYAXACXTGC

SEQ ID NO: 928 - protein, 20 aa, Artificial Sequence
  Synthetically generated peptide
  VARIANT (1)...(20): Xaa = Any Amino Acid
PGXXTCGEICAYAXACTXGC

SEQ ID NO: 929 - protein, 20 aa, Artificial Sequence
  Synthetically generated peptide
  VARIANT (1)...(20): Xaa = Any Amino Acid
PGXXTCGEICAYAXACTGXC

SEQ ID NO: 930 - protein, 20 aa, Artificial Sequence
  Synthetically generated peptide
  VARIANT (1)...(20): Xaa = Any Amino Acid
PGXXTCGEICAYAXACTGCX

SEQ ID NO: 931 - protein, 19 aa, Artificial Sequence
  Synthetically generated peptide
  VARIANT (1)...(19): Xaa = Any Amino Acid
PGXXTCGEICAYAAXCTGC

SEQ ID NO: 932 - protein, 20 aa, Artificial Sequence
  Synthetically generated peptide
  VARIANT (1)...(20): Xaa = Any Amino Acid
PGXXTCGEICAYAAXXCTGC

SEQ ID NO: 933 - protein, 20 aa, Artificial Sequence
  Synthetically generated peptide
  VARIANT (1)...(20): Xaa = Any Amino Acid
PGXXTCGEICAYAAXCXTGC

SEQ ID NO: 934 - protein, 20 aa, Artificial Sequence
  Synthetically generated peptide
  VARIANT (1)...(20): Xaa = Any Amino Acid
PGXXTCGEICAYAAXCTXGC

SEQ ID NO: 935 - protein, 20 aa, Artificial Sequence
  Synthetically generated peptide
  VARIANT (1)...(20): Xaa = Any Amino Acid
PGXXTCGEICAYAAXCTGXC

SEQ ID NO: 936 - protein, 20 aa, Artificial Sequence
  Synthetically generated peptide
  VARIANT (1)...(20): Xaa = Any Amino Acid
PGXXTCGEICAYAAXCTGCX

SEQ ID NO: 937 - protein, 19 aa, Artificial Sequence
  Synthetically generated peptide
  VARIANT (1)...(19): Xaa = Any Amino Acid
PGXXTCGEICAYAACXTGC

SEQ ID NO: 938 - protein, 20 aa, Artificial Sequence
  Synthetically generated peptide
  VARIANT (1)...(20): Xaa = Any Amino Acid
PGXXTCGEICAYAACXXTGC

SEQ ID NO: 939 - protein, 20 aa, Artificial Sequence
  Synthetically generated peptide
  VARIANT (1)...(20): Xaa = Any Amino Acid
PGXXTCGEICAYAACXTXGC

SEQ ID NO: 940 - protein, 20 aa, Artificial Sequence
  Synthetically generated peptide
  VARIANT (1)...(20): Xaa = Any Amino Acid
PGXXTCGEICAYAACXTGXC

SEQ ID NO: 941 - protein, 20 aa, Artificial Sequence
  Synthetically generated peptide
  VARIANT (1)...(20): Xaa = Any Amino Acid
PGXXTCGEICAYAACXTGCX

SEQ ID NO: 942 - protein, 19 aa, Artificial Sequence
  Synthetically generated peptide
  VARIANT (1)...(19): Xaa = Any Amino Acid
PGXXTCGEICAYAACTXGC

SEQ ID NO: 943 - protein, 20 aa, Artificial Sequence
  Synthetically generated peptide
  VARIANT (1)...(20): Xaa = Any Amino Acid
PGXXTCGEICAYAACTXXGC

SEQ ID NO: 944 - protein, 20 aa, Artificial Sequence
  Synthetically generated peptide
  VARIANT (1)...(20): Xaa = Any Amino Acid
PGXXTCGEICAYAACTXGXC

SEQ ID NO: 945 - protein, 20 aa, Artificial Sequence
  Synthetically generated peptide
  VARIANT (1)...(20): Xaa = Any Amino Acid
PGXXTCGEICAYAACTXGCX

SEQ ID NO: 946 - protein, 19 aa, Artificial Sequence
  Synthetically generated peptide
  VARIANT (1)...(19): Xaa = Any Amino Acid
PGXXTCGEICAYAACTGXC

SEQ ID NO: 947 - protein, 20 aa, Artificial Sequence
  Synthetically generated peptide
  VARIANT (1)...(20): Xaa = Any Amino Acid
PGXXTCGEICAYAACTGXXC

SEQ ID NO: 948 - protein, 20 aa, Artificial Sequence
  Synthetically generated peptide
  VARIANT (1)...(20): Xaa = Any Amino Acid
PGXXTCGEICAYAACTGXCX

SEQ ID NO: 949 - protein, 19 aa, Artificial Sequence
  Synthetically generated peptide
  VARIANT (1)...(19): Xaa = Any Amino Acid
PGXXTCGEICAYAACTGCX

SEQ ID NO: 950 - protein, 20 aa, Artificial Sequence
  Synthetically generated peptide
  VARIANT (1)...(20): Xaa = Any Amino Acid
PGXXTCGEICAYAACTGCXX

SEQ ID NO: 951 - protein, 18 aa, Artificial Sequence
  Synthetically generated peptide
  VARIANT (1)...(18): Xaa = Any Amino Acid
PGXTXCGEICAYAACTGC

SEQ ID NO: 952 - protein, 19 aa, Artificial Sequence
  Synthetically generated peptide
  VARIANT (1)...(19): Xaa = Any Amino Acid
PGXTXXCGEICAYAACTGC

SEQ ID NO: 953 - protein, 20 aa, Artificial Sequence
  Synthetically generated peptide
  VARIANT (1)...(20): Xaa = Any Amino Acid
PGXTXXXCGEICAYAACTGC

SEQ ID NO: 954 - protein, 20 aa, Artificial Sequence
  Synthetically generated peptide
  VARIANT (1)...(20): Xaa = Any Amino Acid
PGXTXXCXGEICAYAACTGC

SEQ ID NO: 955 - protein, 20 aa, Artificial Sequence
  Synthetically generated peptide
  VARIANT (1)...(20): Xaa = Any Amino Acid
PGXTXXCGXEICAYAACTGC

SEQ ID NO: 956 - protein, 20 aa, Artificial Sequence
  Synthetically generated peptide
  VARIANT (1)...(20): Xaa = Any Amino Acid
PGXTXXCGEXICAYAACTGC

SEQ ID NO: 957 - protein, 20 aa, Artificial Sequence
  Synthetically generated peptide
  VARIANT (1)...(20): Xaa = Any Amino Acid
PGXTXXCGEIXCAYAACTGC

SEQ ID NO: 958 - protein, 20 aa, Artificial Sequence
  Synthetically generated peptide
  VARIANT (1)...(20): Xaa = Any Amino Acid
PGXTXXCGEICXAYAACTGC

SEQ ID NO: 959 - protein, 20 aa, Artificial Sequence
  Synthetically generated peptide
  VARIANT (1)...(20): Xaa = Any Amino Acid
PGXTXXCGEICAXYAACTGC

SEQ ID NO: 960 - protein, 20 aa, Artificial Sequence
  Synthetically generated peptide
  VARIANT (1)...(20): Xaa = Any Amino Acid
PGXTXXCGEICAYXAACTGC

SEQ ID NO: 961 - protein, 20 aa, Artificial Sequence
  Synthetically generated peptide
  VARIANT (1)...(20): Xaa = Any Amino Acid
PGXTXXCGEICAYAXACTGC

SEQ ID NO: 962 - protein, 20 aa, Artificial Sequence
  Synthetically generated peptide
  VARIANT (1)...(20): Xaa = Any Amino Acid
PGXTXXCGEICAYAAXCTGC

SEQ ID NO: 963 - protein, 20 aa, Artificial Sequence
  Synthetically generated peptide
  VARIANT (1)...(20): Xaa = Any Amino Acid
PGXTXXCGEICAYAACXTGC

SEQ ID NO: 964 - protein, 20 aa, Artificial Sequence
  Synthetically generated peptide
  VARIANT (1)...(20): Xaa = Any Amino Acid
PGXTXXCGEICAYAACTXGC

SEQ ID NO: 965 - protein, 20 aa, Artificial Sequence
  Synthetically generated peptide
  VARIANT (1)...(20): Xaa = Any Amino Acid
PGXTXXCGEICAYAACTGXC

SEQ ID NO: 966 - protein, 20 aa, Artificial Sequence
  Synthetically generated peptide
  VARIANT (1)...(20): Xaa = Any Amino Acid
PGXTXXCGEICAYAACTGCX

SEQ ID NO: 967 - protein, 19 aa, Artificial Sequence
  Synthetically generated peptide
  VARIANT (1)...(19): Xaa = Any Amino Acid
PGXTXCXGEICAYAACTGC

SEQ ID NO: 968 - protein, 20 aa, Artificial Sequence
  Synthetically generated peptide
  VARIANT (1)...(20): Xaa = Any Amino Acid
PGXTXCXXGEICAYAACTGC

SEQ ID NO: 969 - protein, 20 aa, Artificial Sequence
  Synthetically generated peptide
  VARIANT (1)...(20): Xaa = Any Amino Acid
PGXTXCXGXEICAYAACTGC

SEQ ID NO: 970 - protein, 20 aa, Artificial Sequence
  Synthetically generated peptide
  VARIANT (1)...(20): Xaa = Any Amino Acid
PGXTXCXGEXICAYAACTGC

SEQ ID NO: 971 - protein, 20 aa, Artificial Sequence
  Synthetically generated peptide
  VARIANT (1)...(20): Xaa = Any Amino Acid
PGXTXCXGEIXCAYAACTGC

SEQ ID NO: 972 - protein, 20 aa, Artificial Sequence
  Synthetically generated peptide
  VARIANT (1)...(20): Xaa = Any Amino Acid
PGXTXCXGEICXAYAACTGC

SEQ ID NO: 973 - protein, 20 aa, Artificial Sequence
  Synthetically generated peptide
  VARIANT (1)...(20): Xaa = Any Amino Acid
PGXTXCXGEICAXYAACTGC

SEQ ID NO: 974 - protein, 20 aa, Artificial Sequence
  Synthetically generated peptide
  VARIANT (1)...(20): Xaa = Any Amino Acid
PGXTXCXGEICAYXAACTGC

SEQ ID NO: 975 - protein, 20 aa, Artificial Sequence
  Synthetically generated peptide
  VARIANT (1)...(20): Xaa = Any Amino Acid
PGXTXCXGEICAYAXACTGC

SEQ ID NO: 976 - protein, 20 aa, Artificial Sequence
  Synthetically generated peptide
  VARIANT (1)...(20): Xaa = Any Amino Acid
PGXTXCXGEICAYAAXCTGC

SEQ ID NO: 977 - protein, 20 aa, Artificial Sequence
  Synthetically generated peptide
  VARIANT (1)...(20): Xaa = Any Amino Acid
PGXTXCXGEICAYAACXTGC

SEQ ID NO: 978 - protein, 20 aa, Artificial Sequence
  Synthetically generated peptide
  VARIANT (1)...(20): Xaa = Any Amino Acid
PGXTXCXGEICAYAACTXGC

SEQ ID NO: 979 - protein, 20 aa, Artificial Sequence
  Synthetically generated peptide
  VARIANT (1)...(20): Xaa = Any Amino Acid
PGXTXCXGEICAYAACTGXC

SEQ ID NO: 980 - protein, 20 aa, Artificial Sequence
  Synthetically generated peptide
  VARIANT (1)...(20): Xaa = Any Amino Acid
PGXTXCXGEICAYAACTGCX

SEQ ID NO: 981 - protein, 19 aa, Artificial Sequence
  Synthetically generated peptide
  VARIANT (1)...(19): Xaa = Any Amino Acid
PGXTXCGXEICAYAACTGC

SEQ ID NO: 982 - protein, 20 aa, Artificial Sequence
  Synthetically generated peptide
  VARIANT (1)...(20): Xaa = Any Amino Acid
PGXTXCGXXEICAYAACTGC

SEQ ID NO: 983 - protein, 20 aa, Artificial Sequence
  Synthetically generated peptide
  VARIANT (1)...(20): Xaa = Any Amino Acid
PGXTXCGXEXICAYAACTGC

SEQ ID NO: 984 - protein, 20 aa, Artificial Sequence
  Synthetically generated peptide
  VARIANT (1)...(20): Xaa = Any Amino Acid
PGXTXCGXEIXCAYAACTGC

SEQ ID NO: 985 - protein, 20 aa, Artificial Sequence
  Synthetically generated peptide
  VARIANT (1)...(20): Xaa = Any Amino Acid
PGXTXCGXEICXAYAACTGC

SEQ ID NO: 986 - protein, 20 aa, Artificial Sequence
  Synthetically generated peptide
  VARIANT (1)...(20): Xaa = Any Amino Acid
PGXTXCGXEICAXYAACTGC

SEQ ID NO: 987 - protein, 20 aa, Artificial Sequence
  Synthetically generated peptide
  VARIANT (1)...(20): Xaa = Any Amino Acid
PGXTXCGXEICAYXAACTGC

SEQ ID NO: 988 - protein, 20 aa, Artificial Sequence
  Synthetically generated peptide
  VARIANT (1)...(20): Xaa = Any Amino Acid
PGXTXCGXEICAYAXACTGC

SEQ ID NO: 989 - protein, 20 aa, Artificial Sequence
  Synthetically generated peptide
  VARIANT (1)...(20): Xaa = Any Amino Acid
PGXTXCGXEICAYAAXCTGC

SEQ ID NO: 990 - protein, 20 aa, Artificial Sequence
  Synthetically generated peptide
  VARIANT (1)...(20): Xaa = Any Amino Acid
PGXTXCGXEICAYAACXTGC

SEQ ID NO: 991 - protein, 20 aa, Artificial Sequence
  Synthetically generated peptide
  VARIANT (1)...(20): Xaa = Any Amino Acid
PGXTXCGXEICAYAACTXGC

SEQ ID NO: 992 - protein, 20 aa, Artificial Sequence
  Synthetically generated peptide
  VARIANT (1)...(20): Xaa = Any Amino Acid
PGXTXCGXEICAYAACTGXC

SEQ ID NO: 993 - protein, 20 aa, Artificial Sequence
  Synthetically generated peptide
  VARIANT (1)...(20): Xaa = Any Amino Acid
PGXTXCGXEICAYAACTGCX

SEQ ID NO: 994 - protein, 19 aa, Artificial Sequence
  Synthetically generated peptide
  VARIANT (1)...(19): Xaa = Any Amino Acid
PGXTXCGEXICAYAACTGC

SEQ ID NO: 995 - protein, 20 aa, Artificial Sequence
  Synthetically generated peptide
  VARIANT (1)...(20): Xaa = Any Amino Acid
PGXTXCGEXXICAYAACTGC

SEQ ID NO: 996 - protein, 20 aa, Artificial Sequence
  Synthetically generated peptide
  VARIANT (1)...(20): Xaa = Any Amino Acid
PGXTXCGEXIXCAYAACTGC

SEQ ID NO: 997 - protein, 20 aa, Artificial Sequence
  Synthetically generated peptide
  VARIANT (1)...(20): Xaa = Any Amino Acid
PGXTXCGEXICXAYAACTGC

SEQ ID NO: 998 - protein, 20 aa, Artificial Sequence
  Synthetically generated peptide
  VARIANT (1)...(20): Xaa = Any Amino Acid
PGXTXCGEXICAXYAACTGC

SEQ ID NO: 999 - protein, 20 aa, Artificial Sequence
  Synthetically generated peptide
  VARIANT (1)...(20): Xaa = Any Amino Acid
PGXTXCGEXICAYXAACTGC

SEQ ID NO: 1000 - protein, 20 aa, Artificial Sequence
  Synthetically generated peptide
  VARIANT (1)...(20): Xaa = Any Amino Acid
PGXTXCGEXICAYAXACTGC

SEQ ID NO: 1001 - protein, 20 aa, Artificial Sequence
  Synthetically generated peptide
  VARIANT (1)...(20): Xaa = Any Amino Acid
PGXTXCGEXICAYAAXCTGC

SEQ ID NO: 1002 - protein, 20 aa, Artificial Sequence
  Synthetically generated peptide
  VARIANT (1)...(20): Xaa = Any Amino Acid
PGXTXCGEXICAYAACXTGC

SEQ ID NO: 1003 - protein, 20 aa, Artificial Sequence
  Synthetically generated peptide
  VARIANT (1)...(20): Xaa = Any Amino Acid
PGXTXCGEXICAYAACTXGC

SEQ ID NO: 1004 - protein, 20 aa, Artificial Sequence
  Synthetically generated peptide
  VARIANT (1)...(20): Xaa = Any Amino Acid
PGXTXCGEXICAYAACTGXC

SEQ ID NO: 1005 - protein, 20 aa, Artificial Sequence
  Synthetically generated peptide
  VARIANT (1)...(20): Xaa = Any Amino Acid
PGXTXCGEXICAYAACTGCX

SEQ ID NO: 1006 - protein, 19 aa, Artificial Sequence
  Synthetically generated peptide
  VARIANT (1)...(19): Xaa = Any Amino Acid
PGXTXCGEIXCAYAACTGC

SEQ ID NO: 1007 - protein, 20 aa, Artificial Sequence
  Synthetically generated peptide
  VARIANT (1)...(20): Xaa = Any Amino Acid
PGXTXCGEIXXCAYAACTGC

SEQ ID NO: 1008 - protein, 20 aa, Artificial Sequence
  Synthetically generated peptide
  VARIANT (1)...(20): Xaa = Any Amino Acid
PGXTXCGEIXCXAYAACTGC

SEQ ID NO: 1009 - protein, 20 aa, Artificial Sequence
  Synthetically generated peptide
  VARIANT (1)...(20): Xaa = Any Amino Acid
PGXTXCGEIXCAXYAACTGC

SEQ ID NO: 1010 - protein, 20 aa, Artificial Sequence
  Synthetically generated peptide
  VARIANT (1)...(20): Xaa = Any Amino Acid
PGXTXCGEIXCAYXAACTGC

SEQ ID NO: 1011 - protein, 20 aa, Artificial Sequence
  Synthetically generated peptide
  VARIANT (1)...(20): Xaa = Any Amino Acid
PGXTXCGEIXCAYAXACTGC

SEQ ID NO: 1012 - protein, 20 aa, Artificial Sequence
  Synthetically generated peptide
  VARIANT (1)...(20): Xaa = Any Amino Acid
PGXTXCGEIXCAYAAXCTGC

SEQ ID NO: 1013 - protein, 20 aa, Artificial Sequence
  Synthetically generated peptide
  VARIANT (1)...(20): Xaa = Any Amino Acid
PGXTXCGEIXCAYAACXTGC

SEQ ID NO: 1014 - protein, 20 aa, Artificial Sequence
  Synthetically generated peptide
  VARIANT (1)...(20): Xaa = Any Amino Acid
PGXTXCGEIXCAYAACTXGC

SEQ ID NO: 1015 - protein, 20 aa, Artificial Sequence
  Synthetically generated peptide
  VARIANT (1)...(20): Xaa = Any Amino Acid
PGXTXCGEIXCAYAACTGXC

SEQ ID NO: 1016 - protein, 20 aa, Artificial Sequence
  Synthetically generated peptide
  VARIANT (1)...(20): Xaa = Any Amino Acid
PGXTXCGEIXCAYAACTGCX

SEQ ID NO: 1017 - protein, 19 aa, Artificial Sequence
  Synthetically generated peptide
  VARIANT (1)...(19): Xaa = Any Amino Acid
PGXTXCGEICXAYAACTGC

SEQ ID NO: 1018 - protein, 20 aa, Artificial Sequence
  Synthetically generated peptide
  VARIANT (1)...(20): Xaa = Any Amino Acid
PGXTXCGEICXXAYAACTGC

SEQ ID NO: 1019 - protein, 20 aa, Artificial Sequence
  Synthetically generated peptide
  VARIANT (1)...(20): Xaa = Any Amino Acid
PGXTXCGEICXAXYAACTGC

SEQ ID NO: 1020 - protein, 20 aa, Artificial Sequence
  Synthetically generated peptide
  VARIANT (1)...(20): Xaa = Any Amino Acid
PGXTXCGEICXAYXAACTGC

SEQ ID NO: 1021 - protein, 20 aa, Artificial Sequence
  Synthetically generated peptide
  VARIANT (1)...(20): Xaa = Any Amino Acid
PGXTXCGEICXAYAXACTGC

SEQ ID NO: 1022 - protein, 20 aa, Artificial Sequence
  Synthetically generated peptide
  VARIANT (1)...(20): Xaa = Any Amino Acid
PGXTXCGEICXAYAAXCTGC

SEQ ID NO: 1023 - protein, 20 aa, Artificial Sequence
  Synthetically generated peptide
  VARIANT (1)...(20): Xaa = Any Amino Acid
PGXTXCGEICXAYAACXTGC

SEQ ID NO: 1024 - protein, 20 aa, Artificial Sequence
  Synthetically generated peptide
  VARIANT (1)...(20): Xaa = Any Amino Acid
PGXTXCGEICXAYAACTXGC

SEQ ID NO: 1025 - protein, 20 aa, Artificial Sequence
  Synthetically generated peptide
  VARIANT (1)...(20): Xaa = Any Amino Acid
PGXTXCGEICXAYAACTGXC

SEQ ID NO: 1026 - protein, 20 aa, Artificial Sequence
  Synthetically generated peptide
  VARIANT (1)...(20): Xaa = Any Amino Acid
PGXTXCGEICXAYAACTGCX

SEQ ID NO: 1027 - protein, 19 aa, Artificial Sequence
  Synthetically generated peptide
  VARIANT (1)...(19): Xaa = Any Amino Acid
PGXTXCGEICAXYAACTGC

SEQ ID NO: 1028 - protein, 20 aa, Artificial Sequence
  Synthetically generated peptide
  VARIANT (1)...(20): Xaa = Any Amino Acid
PGXTXCGEICAXXYAACTGC

SEQ ID NO: 1029 - protein, 20 aa, Artificial Sequence
  Synthetically generated peptide
  VARIANT (1)...(20): Xaa = Any Amino Acid
PGXTXCGEICAXYXAACTGC

SEQ ID NO: 1030 - protein, 20 aa, Artificial Sequence
  Synthetically generated peptide
  VARIANT (1)...(20): Xaa = Any Amino Acid
PGXTXCGEICAXYAXACTGC

SEQ ID NO: 1031 - protein, 20 aa, Artificial Sequence
  Synthetically generated peptide
  VARIANT (1)...(20): Xaa = Any Amino Acid
PGXTXCGEICAXYAAXCTGC

SEQ ID NO: 1032 - protein, 20 aa, Artificial Sequence
  Synthetically generated peptide
  VARIANT (1)...(20): Xaa = Any Amino Acid
PGXTXCGEICAXYAACXTGC

SEQ ID NO: 1033 - protein, 20 aa, Artificial Sequence
  Synthetically generated peptide
  VARIANT (1)...(20): Xaa = Any Amino Acid
PGXTXCGEICAXYAACTXGC

SEQ ID NO: 1034 - protein, 20 aa, Artificial Sequence
  Synthetically generated peptide
  VARIANT (1)...(20): Xaa = Any Amino Acid
PGXTXCGEICAXYAACTGXC

SEQ ID NO: 1035 - protein, 20 aa, Artificial Sequence
  Synthetically generated peptide
  VARIANT (1)...(20): Xaa = Any Amino Acid
PGXTXCGEICAXYAACTGCX

SEQ ID NO: 1036 - protein, 19 aa, Artificial Sequence
  Synthetically generated peptide
  VARIANT (1)...(19): Xaa = Any Amino Acid
PGXTXCGEICAYXAACTGC

SEQ ID NO: 1037 - protein, 20 aa, Artificial Sequence
  Synthetically generated peptide
  VARIANT (1)...(20): Xaa = Any Amino Acid
PGXTXCGEICAYXXAACTGC

SEQ ID NO: 1038 - protein, 20 aa, Artificial Sequence
  Synthetically generated peptide
  VARIANT (1)...(20): Xaa = Any Amino Acid
PGXTXCGEICAYXAXACTGC

SEQ ID NO: 1039 - protein, 20 aa, Artificial Sequence
  Synthetically generated peptide
  VARIANT (1)...(20): Xaa = Any Amino Acid
PGXTXCGEICAYXAAXCTGC

SEQ ID NO: 1040 - protein, 20 aa, Artificial Sequence
  Synthetically generated peptide
  VARIANT (1)...(20): Xaa = Any Amino Acid
PGXTXCGEICAYXAACXTGC

SEQ ID NO: 1041 - protein, 20 aa, Artificial Sequence
  Synthetically generated peptide
  VARIANT (1)...(20): Xaa = Any Amino Acid
PGXTXCGEICAYXAACTXGC

SEQ ID NO: 1042 - protein, 20 aa, Artificial Sequence
  Synthetically generated peptide
  VARIANT (1)...(20): Xaa = Any Amino Acid
PGXTXCGEICAYXAACTGXC

SEQ ID NO: 1043 - protein, 20 aa, Artificial Sequence
  Synthetically generated peptide
  VARIANT (1)...(20): Xaa = Any Amino Acid
PGXTXCGEICAYXAACTGCX

SEQ ID NO: 1044 - protein, 19 aa, Artificial Sequence
  Synthetically generated peptide
  VARIANT (1)...(19): Xaa = Any Amino Acid
PGXTXCGEICAYAXACTGC

SEQ ID NO: 1045 - protein, 20 aa, Artificial Sequence
  Synthetically generated peptide
  VARIANT (1)...(20): Xaa = Any Amino Acid
PGXTXCGEICAYAXXACTGC

SEQ ID NO: 1046 - protein, 20 aa, Artificial Sequence
  Synthetically generated peptide
  VARIANT (1)...(20): Xaa = Any Amino Acid
PGXTXCGEICAYAXAXCTGC

SEQ ID NO: 1047 - protein, 20 aa, Artificial Sequence
  Synthetically generated peptide
  VARIANT (1)...(20): Xaa = Any Amino Acid
PGXTXCGEICAYAXACXTGC

SEQ ID NO: 1048 - protein, 20 aa, Artificial Sequence
  Synthetically generated peptide
  VARIANT (1)...(20): Xaa = Any Amino Acid
PGXTXCGEICAYAXACTXGC

SEQ ID NO: 1049 - protein, 20 aa, Artificial Sequence
  Synthetically generated peptide
  VARIANT (1)...(20): Xaa = Any Amino Acid
PGXTXCGEICAYAXACTGXC

SEQ ID NO: 1050 - protein, 20 aa, Artificial Sequence
  Synthetically generated peptide
  VARIANT (1)...(20): Xaa = Any Amino Acid
PGXTXCGEICAYAXACTGCX

SEQ ID NO: 1051 - protein, 19 aa, Artificial Sequence
  Synthetically generated peptide
  VARIANT (1)...(19): Xaa = Any Amino Acid
PGXTXCGEICAYAAXCTGC

SEQ ID NO: 1052 - protein, 20 aa, Artificial Sequence
  Synthetically generated peptide
  VARIANT (1)...(20): Xaa = Any Amino Acid
PGXTXCGEICAYAAXXCTGC

SEQ ID NO: 1053 - protein, 20 aa, Artificial Sequence
  Synthetically generated peptide
  VARIANT (1)...(20): Xaa = Any Amino Acid
PGXTXCGEICAYAAXCXTGC

SEQ ID NO: 1054 - protein, 20 aa, Artificial Sequence
  Synthetically generated peptide
  VARIANT (1)...(20): Xaa = Any Amino Acid
PGXTXCGEICAYAAXCTXGC

SEQ ID NO: 1055 - protein, 20 aa, Artificial Sequence
  Synthetically generated peptide
  VARIANT (1)...(20): Xaa = Any Amino Acid
PGXTXCGEICAYAAXCTGXC

SEQ ID NO: 1056 - protein, 20 aa, Artificial Sequence
  Synthetically generated peptide
  VARIANT (1)...(20): Xaa = Any Amino Acid
PGXTXCGEICAYAAXCTGCX

SEQ ID NO: 1057 - protein, 19 aa, Artificial Sequence
  Synthetically generated peptide
  VARIANT (1)...(19): Xaa = Any Amino Acid
PGXTXCGEICAYAACXTGC

SEQ ID NO: 1058 - protein, 20 aa, Artificial Sequence
  Synthetically generated peptide
  VARIANT (1)...(20): Xaa = Any Amino Acid
PGXTXCGEICAYAACXXTGC

SEQ ID NO: 1059 - protein, 20 aa, Artificial Sequence
  Synthetically generated peptide
  VARIANT (1)...(20): Xaa = Any Amino Acid
PGXTXCGEICAYAACXTXGC

SEQ ID NO: 1060 - protein, 20 aa, Artificial Sequence
  Synthetically generated peptide
  VARIANT (1)...(20): Xaa = Any Amino Acid
PGXTXCGEICAYAACXTGXC

SEQ ID NO: 1061 - protein, 20 aa, Artificial Sequence
  Synthetically generated peptide
  VARIANT (1)...(20): Xaa = Any Amino Acid
PGXTXCGEICAYAACXTGCX

SEQ ID NO: 1062 - protein, 19 aa, Artificial Sequence
  Synthetically generated peptide
  VARIANT (1)...(19): Xaa = Any Amino Acid
PGXTXCGEICAYAACTXGC

SEQ ID NO: 1063 - protein, 20 aa, Artificial Sequence
  Synthetically generated peptide
  VARIANT (1)...(20): Xaa = Any Amino Acid
PGXTXCGEICAYAACTXXGC

SEQ ID NO: 1064 - protein, 20 aa, Artificial Sequence
  Synthetically generated peptide
  VARIANT (1)...(20): Xaa = Any Amino Acid
PGXTXCGEICAYAACTXGXC

SEQ ID NO: 1065 - protein, 20 aa, Artificial Sequence
  Synthetically generated peptide
  VARIANT (1)...(20): Xaa = Any Amino Acid
PGXTXCGEICAYAACTXGCX

SEQ ID NO: 1066 - protein, 19 aa, Artificial Sequence
  Synthetically generated peptide
  VARIANT (1)...(19): Xaa = Any Amino Acid
PGXTXCGEICAYAACTGXC

SEQ ID NO: 1067 - protein, 20 aa, Artificial Sequence
  Synthetically generated peptide
  VARIANT (1)...(20): Xaa = Any Amino Acid
PGXTXCGEICAYAACTGXXC

SEQ ID NO: 1068 - protein, 20 aa, Artificial Sequence
  Synthetically generated peptide
  VARIANT (1)...(20): Xaa = Any Amino Acid
PGXTXCGEICAYAACTGXCX

SEQ ID NO: 1069 - protein, 19 aa, Artificial Sequence
  Synthetically generated peptide
  VARIANT (1)...(19): Xaa = Any Amino Acid
PGXTXCGEICAYAACTGCX

SEQ ID NO: 1070 - protein, 20 aa, Artificial Sequence
  Synthetically generated peptide
  VARIANT (1)...(20): Xaa = Any Amino Acid
PGXTXCGEICAYAACTGCXX

SEQ ID NO: 1071 - protein, 18 aa, Artificial Sequence
  Synthetically generated peptide
  VARIANT (1)...(18): Xaa = Any Amino Acid
PGXTCXGEICAYAACTGC

SEQ ID NO: 1072 - protein, 19 aa, Artificial Sequence
  Synthetically generated peptide
  VARIANT (1)...(19): Xaa = Any Amino Acid
PGXTCXXGEICAYAACTGC

SEQ ID NO: 1073 - protein, 20 aa, Artificial Sequence
  Synthetically generated peptide
  VARIANT (1)...(20): Xaa = Any Amino Acid
PGXTCXXXGEICAYAACTGC

SEQ ID NO: 1074 - protein, 20 aa, Artificial Sequence
  Synthetically generated peptide
  VARIANT (1)...(20): Xaa = Any Amino Acid
PGXTCXXGXEICAYAACTGC

SEQ ID NO: 1075 - protein, 20 aa, Artificial Sequence
  Synthetically generated peptide
  VARIANT (1)...(20): Xaa = Any Amino Acid
PGXTCXXGEXICAYAACTGC

SEQ ID NO: 1076 - protein, 20 aa, Artificial Sequence
  Synthetically generated peptide
  VARIANT (1)...(20): Xaa = Any Amino Acid
PGXTCXXGEIXCAYAACTGC

SEQ ID NO: 1077 - protein, 20 aa, Artificial Sequence
  Synthetically generated peptide
  VARIANT (1)...(20): Xaa = Any Amino Acid
PGXTCXXGEICXAYAACTGC

SEQ ID NO: 1078 - protein, 20 aa, Artificial Sequence
  Synthetically generated peptide
  VARIANT (1)...(20): Xaa = Any Amino Acid
PGXTCXXGEICAXYAACTGC

SEQ ID NO: 1079 - protein, 20 aa, Artificial Sequence
  Synthetically generated peptide
  VARIANT (1)...(20): Xaa = Any Amino Acid
PGXTCXXGEICAYXAACTGC

SEQ ID NO: 1080 - protein, 20 aa, Artificial Sequence
  Synthetically generated peptide
  VARIANT (1)...(20): Xaa = Any Amino Acid
PGXTCXXGEICAYAXACTGC

SEQ ID NO: 1081 - protein, 20 aa, Artificial Sequence
  Synthetically generated peptide
  VARIANT (1)...(20): Xaa = Any Amino Acid
PGXTCXXGEICAYAAXCTGC

SEQ ID NO: 1082 - protein, 20 aa, Artificial Sequence
  Synthetically generated peptide
  VARIANT (1)...(20): Xaa = Any Amino Acid
PGXTCXXGEICAYAACXTGC

SEQ ID NO: 1083 - protein, 20 aa, Artificial Sequence
  Synthetically generated peptide
  VARIANT (1)...(20): Xaa = Any Amino Acid
PGXTCXXGEICAYAACTXGC

SEQ ID NO: 1084 - protein, 20 aa, Artificial Sequence
  Synthetically generated peptide
  VARIANT (1)...(20): Xaa = Any Amino Acid
PGXTCXXGEICAYAACTGXC

SEQ ID NO: 1085 - protein, 20 aa, Artificial Sequence
  Synthetically generated peptide
  VARIANT (1)...(20): Xaa = Any Amino Acid
PGXTCXXGEICAYAACTGCX

SEQ ID NO: 1086 - protein, 19 aa, Artificial Sequence
  Synthetically generated peptide
  VARIANT (1)...(19): Xaa = Any Amino Acid
PGXTCXGXEICAYAACTGC

SEQ ID NO: 1087 - protein, 20 aa, Artificial Sequence
  Synthetically generated peptide
  VARIANT (1)...(20): Xaa = Any Amino Acid
PGXTCXGXXEICAYAACTGC

SEQ ID NO: 1088 - protein, 20 aa, Artificial Sequence
  Synthetically generated peptide
  VARIANT (1)...(20): Xaa = Any Amino Acid
PGXTCXGXEXICAYAACTGC

SEQ ID NO: 1089 - protein, 20 aa, Artificial Sequence
  Synthetically generated peptide
  VARIANT (1)...(20): Xaa = Any Amino Acid
PGXTCXGXEIXCAYAACTGC

SEQ ID NO: 1090 - protein, 20 aa, Artificial Sequence
  Synthetically generated peptide
  VARIANT (1)...(20): Xaa = Any Amino Acid
PGXTCXGXEICXAYAACTGC

SEQ ID NO: 1091 - protein, 20 aa, Artificial Sequence
  Synthetically generated peptide
  VARIANT (1)...(20): Xaa = Any Amino Acid
PGXTCXGXEICAXYAACTGC

SEQ ID NO: 1092 - protein, 20 aa, Artificial Sequence
  Synthetically generated peptide
  VARIANT (1)...(20): Xaa = Any Amino Acid
PGXTCXGXEICAYXAACTGC

SEQ ID NO: 1093 - protein, 20 aa, Artificial Sequence
  Synthetically generated peptide
  VARIANT (1)...(20): Xaa = Any Amino Acid
PGXTCXGXEICAYAXACTGC

SEQ ID NO: 1094 - protein, 20 aa, Artificial Sequence
  Synthetically generated peptide
  VARIANT (1)...(20): Xaa = Any Amino Acid
PGXTCXGXEICAYAAXCTGC

SEQ ID NO: 1095 - protein, 20 aa, Artificial Sequence
  Synthetically generated peptide
  VARIANT (1)...(20): Xaa = Any Amino Acid
PGXTCXGXEICAYAACXTGC

SEQ ID NO: 1096 - protein, 20 aa, Artificial Sequence
  Synthetically generated peptide
  VARIANT (1)...(20): Xaa = Any Amino Acid
PGXTCXGXEICAYAACTXGC

SEQ ID NO: 1097 - protein, 20 aa, Artificial Sequence
  Synthetically generated peptide
  VARIANT (1)...(20): Xaa = Any Amino Acid
PGXTCXGXEICAYAACTGXC

SEQ ID NO: 1098 - protein, 20 aa, Artificial Sequence
  Synthetically generated peptide
  VARIANT (1)...(20): Xaa = Any Amino Acid
PGXTCXGXEICAYAACTGCX

SEQ ID NO: 1099 - protein, 19 aa, Artificial Sequence
  Synthetically generated peptide
  VARIANT (1)...(19): Xaa = Any Amino Acid
PGXTCXGEXICAYAACTGC

SEQ ID NO: 1100 - protein, 20 aa, Artificial Sequence
  Synthetically generated peptide
  VARIANT (1)...(20): Xaa = Any Amino Acid
PGXTCXGEXXICAYAACTGC

SEQ ID NO: 1101 - protein, 20 aa, Artificial Sequence
  Synthetically generated peptide
  VARIANT (1)...(20): Xaa = Any Amino Acid
PGXTCXGEXIXCAYAACTGC

SEQ ID NO: 1102 - protein, 20 aa, Artificial Sequence
  Synthetically generated peptide
  VARIANT (1)...(20): Xaa = Any Amino Acid
PGXTCXGEXICXAYAACTGC

SEQ ID NO: 1103 - protein, 20 aa, Artificial Sequence
  Synthetically generated peptide
  VARIANT (1)...(20): Xaa = Any Amino Acid
PGXTCXGEXICAXYAACTGC

SEQ ID NO: 1104 - protein, 20 aa, Artificial Sequence
  Synthetically generated peptide
  VARIANT (1)...(20): Xaa = Any Amino Acid
PGXTCXGEXICAYXAACTGC

SEQ ID NO: 1105 - protein, 20 aa, Artificial Sequence
  Synthetically generated peptide
  VARIANT (1)...(20): Xaa = Any Amino Acid
PGXTCXGEXICAYAXACTGC

SEQ ID NO: 1106 - protein, 20 aa, Artificial Sequence
  Synthetically generated peptide
  VARIANT (1)...(20): Xaa = Any Amino Acid
PGXTCXGEXICAYAAXCTGC

SEQ ID NO: 1107 - protein, 20 aa, Artificial Sequence
  Synthetically generated peptide
  VARIANT (1)...(20): Xaa = Any Amino Acid
PGXTCXGEXICAYAACXTGC

SEQ ID NO: 1108 - protein, 20 aa, Artificial Sequence
  Synthetically generated peptide
  VARIANT (1)...(20): Xaa = Any Amino Acid
PGXTCXGEXICAYAACTXGC

SEQ ID NO: 1109 - protein, 20 aa, Artificial Sequence
  Synthetically generated peptide
  VARIANT (1)...(20): Xaa = Any Amino Acid
PGXTCXGEXICAYAACTGXC

SEQ ID NO: 1110 - protein, 20 aa, Artificial Sequence
  Synthetically generated peptide
  VARIANT (1)...(20): Xaa = Any Amino Acid
PGXTCXGEXICAYAACTGCX

SEQ ID NO: 1111 - protein, 19 aa, Artificial Sequence
  Synthetically generated peptide
  VARIANT (1)...(19): Xaa = Any Amino Acid
PGXTCXGEIXCAYAACTGC

SEQ ID NO: 1112 - protein, 20 aa, Artificial Sequence
  Synthetically generated peptide
  VARIANT (1)...(20): Xaa = Any Amino Acid
PGXTCXGEIXXCAYAACTGC

SEQ ID NO: 1113 - protein, 20 aa, Artificial Sequence
  Synthetically generated peptide
  VARIANT (1)...(20): Xaa = Any Amino Acid
PGXTCXGEIXCXAYAACTGC

SEQ ID NO: 1114 - protein, 20 aa, Artificial Sequence
  Synthetically generated peptide
  VARIANT (1)...(20): Xaa = Any Amino Acid
PGXTCXGEIXCAXYAACTGC

SEQ ID NO: 1115 - protein, 20 aa, Artificial Sequence
  Synthetically generated peptide
  VARIANT (1)...(20): Xaa = Any Amino Acid
PGXTCXGEIXCAYXAACTGC

SEQ ID NO: 1116 - protein, 20 aa, Artificial Sequence
  Synthetically generated peptide
  VARIANT (1)...(20): Xaa = Any Amino Acid
PGXTCXGEIXCAYAXACTGC

SEQ ID NO: 1117 - protein, 20 aa, Artificial Sequence
  Synthetically generated peptide
  VARIANT (1)...(20): Xaa = Any Amino Acid
PGXTCXGEIXCAYAAXCTGC

SEQ ID NO: 1118 - protein, 20 aa, Artificial Sequence
  Synthetically generated peptide
  VARIANT (1)...(20): Xaa = Any Amino Acid
PGXTCXGEIXCAYAACXTGC

SEQ ID NO: 1119 - protein, 20 aa, Artificial Sequence
  Synthetically generated peptide
  VARIANT (1)...(20): Xaa = Any Amino Acid
PGXTCXGEIXCAYAACTXGC

SEQ ID NO: 1120 - protein, 20 aa, Artificial Sequence
  Synthetically generated peptide
  VARIANT (1)...(20): Xaa = Any Amino Acid
PGXTCXGEIXCAYAACTGXC

SEQ ID NO: 1121 - protein, 20 aa, Artificial Sequence
  Synthetically generated peptide
  VARIANT (1)...(20): Xaa = Any Amino Acid
PGXTCXGEIXCAYAACTGCX

SEQ ID NO: 1122 - protein, 19 aa, Artificial Sequence
  Synthetically generated peptide
  VARIANT (1)...(19): Xaa = Any Amino Acid
PGXTCXGEICXAYAACTGC

SEQ ID NO: 1123 - protein, 20 aa, Artificial Sequence
  Synthetically generated peptide
  VARIANT (1)...(20): Xaa = Any Amino Acid
PGXTCXGEICXXAYAACTGC

SEQ ID NO: 1124 - protein, 20 aa, Artificial Sequence
  Synthetically generated peptide
  VARIANT (1)...(20): Xaa = Any Amino Acid
PGXTCXGEICXAXYAACTGC

SEQ ID NO: 1125 - protein, 20 aa, Artificial Sequence
  Synthetically generated peptide
  VARIANT (1)...(20): Xaa = Any Amino Acid
PGXTCXGEICXAYXAACTGC

SEQ ID NO: 1126 - protein, 20 aa, Artificial Sequence
  Synthetically generated peptide
  VARIANT (1)...(20): Xaa = Any Amino Acid
PGXTCXGEICXAYAXACTGC

SEQ ID NO: 1127 - protein, 20 aa, Artificial Sequence
  Synthetically generated peptide
  VARIANT (1)...(20): Xaa = Any Amino Acid
PGXTCXGEICXAYAAXCTGC

SEQ ID NO: 1128 - protein, 20 aa, Artificial Sequence
  Synthetically generated peptide
  VARIANT (1)...(20): Xaa = Any Amino Acid
PGXTCXGEICXAYAACXTGC

SEQ ID NO: 1129 - protein, 20 aa, Artificial Sequence
  Synthetically generated peptide
  VARIANT (1)...(20): Xaa = Any Amino Acid
PGXTCXGEICXAYAACTXGC

SEQ ID NO: 1130 - protein, 20 aa, Artificial Sequence
  Synthetically generated peptide
  VARIANT (1)...(20): Xaa = Any Amino Acid
PGXTCXGEICXAYAACTGXC

SEQ ID NO: 1131 - protein, 20 aa, Artificial Sequence
  Synthetically generated peptide
  VARIANT (1)...(20): Xaa = Any Amino Acid
PGXTCXGEICXAYAACTGCX

SEQ ID NO: 1132 - protein, 19 aa, Artificial Sequence
  Synthetically generated peptide
  VARIANT (1)...(19): Xaa = Any Amino Acid
PGXTCXGEICAXYAACTGC

SEQ ID NO: 1133 - protein, 20 aa, Artificial Sequence
  Synthetically generated peptide
  VARIANT (1)...(20): Xaa = Any Amino Acid
PGXTCXGEICAXXYAACTGC

SEQ ID NO: 1134 - protein, 20 aa, Artificial Sequence
  Synthetically generated peptide
  VARIANT (1)...(20): Xaa = Any Amino Acid
PGXTCXGEICAXYXAACTGC

SEQ ID NO: 1135 - protein, 20 aa, Artificial Sequence
  Synthetically generated peptide
  VARIANT (1)...(20): Xaa = Any Amino Acid
PGXTCXGEICAXYAXACTGC

SEQ ID NO: 1136 - protein, 20 aa, Artificial Sequence
  Synthetically generated peptide
  VARIANT (1)...(20): Xaa = Any Amino Acid
PGXTCXGEICAXYAAXCTGC

SEQ ID NO: 1137 - protein, 20 aa, Artificial Sequence
  Synthetically generated peptide
  VARIANT (1)...(20): Xaa = Any Amino Acid
PGXTCXGEICAXYAACXTGC

SEQ ID NO: 1138 - protein, 20 aa, Artificial Sequence
  Synthetically generated peptide
  VARIANT (1)...(20): Xaa = Any Amino Acid
PGXTCXGEICAXYAACTXGC

SEQ ID NO: 1139 - protein, 20 aa, Artificial Sequence
  Synthetically generated peptide
  VARIANT (1)...(20): Xaa = Any Amino Acid
PGXTCXGEICAXYAACTGXC

SEQ ID NO: 1140 - protein, 20 aa, Artificial Sequence
  Synthetically generated peptide
  VARIANT (1)...(20): Xaa = Any Amino Acid
PGXTCXGEICAXYAACTGCX

SEQ ID NO: 1141 - protein, 19 aa, Artificial Sequence
  Synthetically generated peptide
  VARIANT (1)...(19): Xaa = Any Amino Acid
PGXTCXGEICAYXAACTGC

SEQ ID NO: 1142 - protein, 20 aa, Artificial Sequence
  Synthetically generated peptide
  VARIANT (1)...(20): Xaa = Any Amino Acid
PGXTCXGEICAYXXAACTGC

SEQ ID NO: 1143 - protein, 20 aa, Artificial Sequence
  Synthetically generated peptide
  VARIANT (1)...(20): Xaa = Any Amino Acid
PGXTCXGEICAYXAXACTGC

SEQ ID NO: 1144 - protein, 20 aa, Artificial Sequence
  Synthetically generated peptide
  VARIANT (1)...(20): Xaa = Any Amino Acid
PGXTCXGEICAYXAAXCTGC

SEQ ID NO: 1145 - protein, 20 aa, Artificial Sequence
  Synthetically generated peptide
  VARIANT (1)...(20): Xaa = Any Amino Acid
PGXTCXGEICAYXAACXTGC

SEQ ID NO: 1146 - protein, 20 aa, Artificial Sequence
  Synthetically generated peptide
  VARIANT (1)...(20): Xaa = Any Amino Acid
PGXTCXGEICAYXAACTXGC

SEQ ID NO: 1147 - protein, 20 aa, Artificial Sequence
  Synthetically generated peptide
  VARIANT (1)...(20): Xaa = Any Amino Acid
PGXTCXGEICAYXAACTGXC

SEQ ID NO: 1148 - protein, 20 aa, Artificial Sequence
  Synthetically generated peptide
  VARIANT (1)...(20): Xaa = Any Amino Acid
PGXTCXGEICAYXAACTGCX

SEQ ID NO: 1149 - protein, 19 aa, Artificial Sequence
  Synthetically generated peptide
  VARIANT (1)...(19): Xaa = Any Amino Acid
PGXTCXGEICAYAXACTGC

SEQ ID NO: 1150 - protein, 20 aa, Artificial Sequence
  Synthetically generated peptide
  VARIANT (1)...(20): Xaa = Any Amino Acid
PGXTCXGEICAYAXXACTGC

SEQ ID NO: 1151 - protein, 20 aa, Artificial Sequence
  Synthetically generated peptide
  VARIANT (1)...(20): Xaa = Any Amino Acid
PGXTCXGEICAYAXAXCTGC

SEQ ID NO: 1152 - protein, 20 aa, Artificial Sequence
  Synthetically generated peptide
  VARIANT (1)...(20): Xaa = Any Amino Acid
PGXTCXGEICAYAXACXTGC

SEQ ID NO: 1153 - protein, 20 aa, Artificial Sequence
  Synthetically generated peptide
  VARIANT (1)...(20): Xaa = Any Amino Acid
PGXTCXGEICAYAXACTXGC

SEQ ID NO: 1154 - protein, 20 aa, Artificial Sequence
  Synthetically generated peptide
  VARIANT (1)...(20): Xaa = Any Amino Acid
PGXTCXGEICAYAXACTGXC

SEQ ID NO: 1155 - protein, 20 aa, Artificial Sequence
  Synthetically generated peptide
  VARIANT (1)...(20): Xaa = Any Amino Acid
PGXTCXGEICAYAXACTGCX

SEQ ID NO: 1156 - protein, 19 aa, Artificial Sequence
  Synthetically generated peptide
  VARIANT (1)...(19): Xaa = Any Amino Acid
PGXTCXGEICAYAAXCTGC

SEQ ID NO: 1157 - protein, 20 aa, Artificial Sequence
  Synthetically generated peptide
  VARIANT (1)...(20): Xaa = Any Amino Acid
PGXTCXGEICAYAAXXCTGC

SEQ ID NO: 1158 - protein, 20 aa, Artificial Sequence
  Synthetically generated peptide
  VARIANT (1)...(20): Xaa = Any Amino Acid
PGXTCXGEICAYAAXCXTGC

SEQ ID NO: 1159 - protein, 20 aa, Artificial Sequence
  Synthetically generated peptide
  VARIANT (1)...(20): Xaa = Any Amino Acid
PGXTCXGEICAYAAXCTXGC

SEQ ID NO: 1160 - protein, 20 aa, Artificial Sequence
  Synthetically generated peptide
  VARIANT (1)...(20): Xaa = Any Amino Acid
PGXTCXGEICAYAAXCTGXC

SEQ ID NO: 1161 - protein, 20 aa, Artificial Sequence
  Synthetically generated peptide
  VARIANT (1)...(20): Xaa = Any Amino Acid
PGXTCXGEICAYAAXCTGCX

SEQ ID NO: 1162 - protein, 19 aa, Artificial Sequence
  Synthetically generated peptide
  VARIANT (1)...(19): Xaa = Any Amino Acid
PGXTCXGEICAYAACXTGC

SEQ ID NO: 1163 - protein, 20 aa, Artificial Sequence
  Synthetically generated peptide
  VARIANT (1)...(20): Xaa = Any Amino Acid
PGXTCXGEICAYAACXXTGC

SEQ ID NO: 1164 - protein, 20 aa, Artificial Sequence
  Synthetically generated peptide
  VARIANT (1)...(20): Xaa = Any Amino Acid
PGXTCXGEICAYAACXTXGC

SEQ ID NO: 1165 - protein, 20 aa, Artificial Sequence
  Synthetically generated peptide
  VARIANT (1)...(20): Xaa = Any Amino Acid
PGXTCXGEICAYAACXTGXC

SEQ ID NO: 1166 - protein, 20 aa, Artificial Sequence
  Synthetically generated peptide
  VARIANT (1)...(20): Xaa = Any Amino Acid
PGXTCXGEICAYAACXTGCX

SEQ ID NO: 1167 - protein, 19 aa, Artificial Sequence
  Synthetically generated peptide
  VARIANT (1)...(19): Xaa = Any Amino Acid
PGXTCXGEICAYAACTXGC

SEQ ID NO: 1168 - protein, 20 aa, Artificial Sequence
  Synthetically generated peptide
  VARIANT (1)...(20): Xaa = Any Amino Acid
PGXTCXGEICAYAACTXXGC

SEQ ID NO: 1169 - protein, 20 aa, Artificial Sequence
  Synthetically generated peptide
  VARIANT (1)...(20): Xaa = Any Amino Acid
PGXTCXGEICAYAACTXGXC

SEQ ID NO: 1170 - protein, 20 aa, Artificial Sequence
  Synthetically generated peptide
  VARIANT (1)...(20): Xaa = Any Amino Acid
PGXTCXGEICAYAACTXGCX

SEQ ID NO: 1171 - protein, 19 aa, Artificial Sequence
  Synthetically generated peptide
  VARIANT (1)...(19): Xaa = Any Amino Acid
PGXTCXGEICAYAACTGXC

SEQ ID NO: 1172 - protein, 20 aa, Artificial Sequence
  Synthetically generated peptide
  VARIANT (1)...(20): Xaa = Any Amino Acid
PGXTCXGEICAYAACTGXXC

SEQ ID NO: 1173 - protein, 20 aa, Artificial Sequence
  Synthetically generated peptide
  VARIANT (1)...(20): Xaa = Any Amino Acid
PGXTCXGEICAYAACTGXCX

SEQ ID NO: 1174 - protein, 19 aa, Artificial Sequence
  Synthetically generated peptide
  VARIANT (1)...(19): Xaa = Any Amino Acid
PGXTCXGEICAYAACTGCX

SEQ ID NO: 1175 - protein, 20 aa, Artificial Sequence
  Synthetically generated peptide
  VARIANT (1)...(20): Xaa = Any Amino Acid
PGXTCXGEICAYAACTGCXX

SEQ ID NO: 1176 - protein, 18 aa, Artificial Sequence
  Synthetically generated peptide
  VARIANT (1)...(18): Xaa = Any Amino Acid
PGXTCGXEICAYAACTGC

SEQ ID NO: 1177 - protein, 19 aa, Artificial Sequence
  Synthetically generated peptide
  VARIANT (1)...(19): Xaa = Any Amino Acid
PGXTCGXXEICAYAACTGC

SEQ ID NO: 1178 - protein, 20 aa, Artificial Sequence
  Synthetically generated peptide
  VARIANT (1)...(20): Xaa = Any Amino Acid
PGXTCGXXXEICAYAACTGC

SEQ ID NO: 1179 - protein, 20 aa, Artificial Sequence
  Synthetically generated peptide
  VARIANT (1)...(20): Xaa = Any Amino Acid
PGXTCGXXEXICAYAACTGC

SEQ ID NO: 1180 - protein, 20 aa, Artificial Sequence
  Synthetically generated peptide
  VARIANT (1)...(20): Xaa = Any Amino Acid
PGXTCGXXEIXCAYAACTGC

SEQ ID NO: 1181 - protein, 20 aa, Artificial Sequence
  Synthetically generated peptide
  VARIANT (1)...(20): Xaa = Any Amino Acid
PGXTCGXXEICXAYAACTGC

SEQ ID NO: 1182 - protein, 20 aa, Artificial Sequence
  Synthetically generated peptide
  VARIANT (1)...(20): Xaa = Any Amino Acid
PGXTCGXXEICAXYAACTGC

SEQ ID NO: 1183 - protein, 20 aa, Artificial Sequence
  Synthetically generated peptide
  VARIANT (1)...(20): Xaa = Any Amino Acid
PGXTCGXXEICAYXAACTGC

SEQ ID NO: 1184 - protein, 20 aa, Artificial Sequence
  Synthetically generated peptide
  VARIANT (1)...(20): Xaa = Any Amino Acid
PGXTCGXXEICAYAXACTGC

SEQ ID NO: 1185 - protein, 20 aa, Artificial Sequence
  Synthetically generated peptide
  VARIANT (1)...(20): Xaa = Any Amino Acid
PGXTCGXXEICAYAAXCTGC

SEQ ID NO: 1186 - protein, 20 aa, Artificial Sequence
  Synthetically generated peptide
  VARIANT (1)...(20): Xaa = Any Amino Acid
PGXTCGXXEICAYAACXTGC

SEQ ID NO: 1187 - protein, 20 aa, Artificial Sequence
  Synthetically generated peptide
  VARIANT (1)...(20): Xaa = Any Amino Acid
PGXTCGXXEICAYAACTXGC

SEQ ID NO: 1188 - protein, 20 aa, Artificial Sequence
  Synthetically generated peptide
  VARIANT (1)...(20): Xaa = Any Amino Acid
PGXTCGXXEICAYAACTGXC

SEQ ID NO: 1189 - protein, 20 aa, Artificial Sequence
  Synthetically generated peptide
  VARIANT (1)...(20): Xaa = Any Amino Acid
PGXTCGXXEICAYAACTGCX

SEQ ID NO: 1190 - protein, 19 aa, Artificial Sequence
  Synthetically generated peptide
  VARIANT (1)...(19): Xaa = Any Amino Acid
PGXTCGXEXICAYAACTGC

SEQ ID NO: 1191 - protein, 20 aa, Artificial Sequence
  Synthetically generated peptide
  VARIANT (1)...(20): Xaa = Any Amino Acid
PGXTCGXEXXICAYAACTGC

SEQ ID NO: 1192 - protein, 20 aa, Artificial Sequence
  Synthetically generated peptide
  VARIANT (1)...(20): Xaa = Any Amino Acid
PGXTCGXEXIXCAYAACTGC

SEQ ID NO: 1193 - protein, 20 aa, Artificial Sequence
  Synthetically generated peptide
  VARIANT (1)...(20): Xaa = Any Amino Acid
PGXTCGXEXICXAYAACTGC

SEQ ID NO: 1194 - protein, 20 aa, Artificial Sequence
  Synthetically generated peptide
  VARIANT (1)...(20): Xaa = Any Amino Acid
PGXTCGXEXICAXYAACTGC

SEQ ID NO: 1195 - protein, 20 aa, Artificial Sequence
  Synthetically generated peptide
  VARIANT (1)...(20): Xaa = Any Amino Acid
PGXTCGXEXICAYXAACTGC

SEQ ID NO: 1196 - protein, 20 aa, Artificial Sequence
  Synthetically generated peptide
  VARIANT (1)...(20): Xaa = Any Amino Acid
PGXTCGXEXICAYAXACTGC

SEQ ID NO: 1197 - protein, 20 aa, Artificial Sequence
  Synthetically generated peptide
  VARIANT (1)...(20): Xaa = Any Amino Acid
PGXTCGXEXICAYAAXCTGC

SEQ ID NO: 1198 - protein, 20 aa, Artificial Sequence
  Synthetically generated peptide
  VARIANT (1)...(20): Xaa = Any Amino Acid
PGXTCGXEXICAYAACXTGC

SEQ ID NO: 1199 - protein, 20 aa, Artificial Sequence
  Synthetically generated peptide
  VARIANT (1)...(20): Xaa = Any Amino Acid
PGXTCGXEXICAYAACTXGC

SEQ ID NO: 1200 - protein, 20 aa, Artificial Sequence
  Synthetically generated peptide
  VARIANT (1)...(20): Xaa = Any Amino Acid
PGXTCGXEXICAYAACTGXC

SEQ ID NO: 1201 - protein, 20 aa, Artificial Sequence
  Synthetically generated peptide
  VARIANT (1)...(20): Xaa = Any Amino Acid
PGXTCGXEXICAYAACTGCX

SEQ ID NO: 1202 - protein, 19 aa, Artificial Sequence
  Synthetically generated peptide
  VARIANT (1)...(19): Xaa = Any Amino Acid
PGXTCGXEIXCAYAACTGC

SEQ ID NO: 1203 - protein, 20 aa, Artificial Sequence
  Synthetically generated peptide
  VARIANT (1)...(20): Xaa = Any Amino Acid
PGXTCGXEIXXCAYAACTGC

SEQ ID NO: 1204 - protein, 20 aa, Artificial Sequence
  Synthetically generated peptide
  VARIANT (1)...(20): Xaa = Any Amino Acid
PGXTCGXEIXCXAYAACTGC

SEQ ID NO: 1205 - protein, 20 aa, Artificial Sequence
  Synthetically generated peptide
  VARIANT (1)...(20): Xaa = Any Amino Acid
PGXTCGXEIXCAXYAACTGC

SEQ ID NO: 1206 - protein, 20 aa, Artificial Sequence
  Synthetically generated peptide
  VARIANT (1)...(20): Xaa = Any Amino Acid
PGXTCGXEIXCAYXAACTGC

SEQ ID NO: 1207 - protein, 20 aa, Artificial Sequence
  Synthetically generated peptide
  VARIANT (1)...(20): Xaa = Any Amino Acid
PGXTCGXEIXCAYAXACTGC

SEQ ID NO: 1208 - protein, 20 aa, Artificial Sequence
  Synthetically generated peptide
  VARIANT (1)...(20): Xaa = Any Amino Acid
PGXTCGXEIXCAYAAXCTGC

SEQ ID NO: 1209 - protein, 20 aa, Artificial Sequence
  Synthetically generated peptide
  VARIANT (1)...(20): Xaa = Any Amino Acid
PGXTCGXEIXCAYAACXTGC

SEQ ID NO: 1210 - protein, 20 aa, Artificial Sequence
  Synthetically generated peptide
  VARIANT (1)...(20): Xaa = Any Amino Acid
PGXTCGXEIXCAYAACTXGC

SEQ ID NO: 1211 - protein, 20 aa, Artificial Sequence
  Synthetically generated peptide
  VARIANT (1)...(20): Xaa = Any Amino Acid
PGXTCGXEIXCAYAACTGXC

SEQ ID NO: 1212 - protein, 20 aa, Artificial Sequence
  Synthetically generated peptide
  VARIANT (1)...(20): Xaa = Any Amino Acid
PGXTCGXEIXCAYAACTGCX

SEQ ID NO: 1213 - protein, 19 aa, Artificial Sequence
  Synthetically generated peptide
  VARIANT (1)...(19): Xaa = Any Amino Acid
PGXTCGXEICXAYAACTGC

SEQ ID NO: 1214 - protein, 20 aa, Artificial Sequence
  Synthetically generated peptide
  VARIANT (1)...(20): Xaa = Any Amino Acid
PGXTCGXEICXXAYAACTGC

SEQ ID NO: 1215 - protein, 20 aa, Artificial Sequence
  Synthetically generated peptide
  VARIANT (1)...(20): Xaa = Any Amino Acid
PGXTCGXEICXAXYAACTGC

SEQ ID NO: 1216 - protein, 20 aa, Artificial Sequence
  Synthetically generated peptide
  VARIANT (1)...(20): Xaa = Any Amino Acid
PGXTCGXEICXAYXAACTGC

SEQ ID NO: 1217 - protein, 20 aa, Artificial Sequence
  Synthetically generated peptide
  VARIANT (1)...(20): Xaa = Any Amino Acid
PGXTCGXEICXAYAXACTGC

SEQ ID NO: 1218 - protein, 20 aa, Artificial Sequence
  Synthetically generated peptide
  VARIANT (1)...(20): Xaa = Any Amino Acid
PGXTCGXEICXAYAAXCTGC

SEQ ID NO: 1219 - protein, 20 aa, Artificial Sequence
  Synthetically generated peptide
  VARIANT (1)...(20): Xaa = Any Amino Acid
PGXTCGXEICXAYAACXTGC

SEQ ID NO: 1220 - protein, 20 aa, Artificial Sequence
  Synthetically generated peptide
  VARIANT (1)...(20): Xaa = Any Amino Acid
PGXTCGXEICXAYAACTXGC

SEQ ID NO: 1221 - protein, 20 aa, Artificial Sequence
  Synthetically generated peptide
  VARIANT (1)...(20): Xaa = Any Amino Acid
PGXTCGXEICXAYAACTGXC

SEQ ID NO: 1222 - protein, 20 aa, Artificial Sequence
  Synthetically generated peptide
  VARIANT (1)...(20): Xaa = Any Amino Acid
PGXTCGXEICXAYAACTGCX

SEQ ID NO: 1223 - protein, 19 aa, Artificial Sequence
  Synthetically generated peptide
  VARIANT (1)...(19): Xaa = Any Amino Acid
PGXTCGXEICAXYAACTGC

SEQ ID NO: 1224 - protein, 20 aa, Artificial Sequence
  Synthetically generated peptide
  VARIANT (1)...(20): Xaa = Any Amino Acid
PGXTCGXEICAXXYAACTGC

SEQ ID NO: 1225 - protein, 20 aa, Artificial Sequence
  Synthetically generated peptide
  VARIANT (1)...(20): Xaa = Any Amino Acid
PGXTCGXEICAXYXAACTGC

SEQ ID NO: 1226 - protein, 20 aa, Artificial Sequence
  Synthetically generated peptide
  VARIANT (1)...(20): Xaa = Any Amino Acid
PGXTCGXEICAXYAXACTGC

SEQ ID NO: 1227 - protein, 20 aa, Artificial Sequence
  Synthetically generated peptide
  VARIANT (1)...(20): Xaa = Any Amino Acid
PGXTCGXEICAXYAAXCTGC

SEQ ID NO: 1228 - protein, 20 aa, Artificial Sequence
  Synthetically generated peptide
  VARIANT (1)...(20): Xaa = Any Amino Acid
PGXTCGXEICAXYAACXTGC

SEQ ID NO: 1229 - protein, 20 aa, Artificial Sequence
  Synthetically generated peptide
  VARIANT (1)...(20): Xaa = Any Amino Acid
PGXTCGXEICAXYAACTXGC

SEQ ID NO: 1230 - protein, 20 aa, Artificial Sequence
  Synthetically generated peptide
  VARIANT (1)...(20): Xaa = Any Amino Acid
PGXTCGXEICAXYAACTGXC

SEQ ID NO: 1231 - protein, 20 aa, Artificial Sequence
  Synthetically generated peptide
  VARIANT (1)...(20): Xaa = Any Amino Acid
PGXTCGXEICAXYAACTGCX

SEQ ID NO: 1232 - protein, 19 aa, Artificial Sequence
  Synthetically generated peptide
  VARIANT (1)...(19): Xaa = Any Amino Acid
PGXTCGXEICAYXAACTGC

SEQ ID NO: 1233 - protein, 20 aa, Artificial Sequence
  Synthetically generated peptide
  VARIANT (1)...(20): Xaa = Any Amino Acid
PGXTCGXEICAYXXAACTGC

SEQ ID NO: 1234 - protein, 20 aa, Artificial Sequence
  Synthetically generated peptide
  VARIANT (1)...(20): Xaa = Any Amino Acid
PGXTCGXEICAYXAXACTGC

SEQ ID NO: 1235 - protein, 20 aa, Artificial Sequence
  Synthetically generated peptide
  VARIANT (1)...(20): Xaa = Any Amino Acid
PGXTCGXEICAYXAAXCTGC

SEQ ID NO: 1236 - protein, 20 aa, Artificial Sequence
  Synthetically generated peptide
  VARIANT (1)...(20): Xaa = Any Amino Acid
PGXTCGXEICAYXAACXTGC

SEQ ID NO: 1237 - protein, 20 aa, Artificial Sequence
  Synthetically generated peptide
  VARIANT (1)...(20): Xaa = Any Amino Acid
PGXTCGXEICAYXAACTXGC

SEQ ID NO: 1238 - protein, 20 aa, Artificial Sequence
  Synthetically generated peptide
  VARIANT (1)...(20): Xaa = Any Amino Acid
PGXTCGXEICAYXAACTGXC

SEQ ID NO: 1239 - protein, 20 aa, Artificial Sequence
  Synthetically generated peptide
  VARIANT (1)...(20): Xaa = Any Amino Acid
PGXTCGXEICAYXAACTGCX

SEQ ID NO: 1240 - protein, 19 aa, Artificial Sequence
  Synthetically generated peptide
  VARIANT (1)...(19): Xaa = Any Amino Acid
PGXTCGXEICAYAXACTGC

SEQ ID NO: 1241 - protein, 20 aa, Artificial Sequence
  Synthetically generated peptide
  VARIANT (1)...(20): Xaa = Any Amino Acid
PGXTCGXEICAYAXXACTGC

SEQ ID NO: 1242 - protein, 20 aa, Artificial Sequence
  Synthetically generated peptide
  VARIANT (1)...(20): Xaa = Any Amino Acid
PGXTCGXEICAYAXAXCTGC

SEQ ID NO: 1243 - protein, 20 aa, Artificial Sequence
  Synthetically generated peptide
  VARIANT (1)...(20): Xaa = Any Amino Acid
PGXTCGXEICAYAXACXTGC

SEQ ID NO: 1244 - protein, 20 aa, Artificial Sequence
  Synthetically generated peptide
  VARIANT (1)...(20): Xaa = Any Amino Acid
PGXTCGXEICAYAXACTXGC

SEQ ID NO: 1245 - protein, 20 aa, Artificial Sequence
  Synthetically generated peptide
  VARIANT (1)...(20): Xaa = Any Amino Acid
PGXTCGXEICAYAXACTGXC

SEQ ID NO: 1246 - protein, 20 aa, Artificial Sequence
  Synthetically generated peptide
  VARIANT (1)...(20): Xaa = Any Amino Acid
PGXTCGXEICAYAXACTGCX

SEQ ID NO: 1247 - protein, 19 aa, Artificial Sequence
  Synthetically generated peptide
  VARIANT (1)...(19): Xaa = Any Amino Acid
PGXTCGXEICAYAAXCTGC

SEQ ID NO: 1248 - protein, 20 aa, Artificial Sequence
  Synthetically generated peptide
  VARIANT (1)...(20): Xaa = Any Amino Acid
PGXTCGXEICAYAAXXCTGC

SEQ ID NO: 1249 - protein, 20 aa, Artificial Sequence
  Synthetically generated peptide
  VARIANT (1)...(20): Xaa = Any Amino Acid
PGXTCGXEICAYAAXCXTGC

SEQ ID NO: 1250 - protein, 20 aa, Artificial Sequence
  Synthetically generated peptide
  VARIANT (1)...(20): Xaa = Any Amino Acid
PGXTCGXEICAYAAXCTXGC

SEQ ID NO: 1251 - protein, 20 aa, Artificial Sequence
  Synthetically generated peptide
  VARIANT (1)...(20): Xaa = Any Amino Acid
PGXTCGXEICAYAAXCTGXC

SEQ ID NO: 1252 - protein, 20 aa, Artificial Sequence
  Synthetically generated peptide
  VARIANT (1)...(20): Xaa = Any Amino Acid
PGXTCGXEICAYAAXCTGCX

SEQ ID NO: 1253 - protein, 19 aa, Artificial Sequence
  Synthetically generated peptide
  VARIANT (1)...(19): Xaa = Any Amino Acid
PGXTCGXEICAYAACXTGC

SEQ ID NO: 1254 - protein, 20 aa, Artificial Sequence
  Synthetically generated peptide
  VARIANT (1)...(20): Xaa = Any Amino Acid
PGXTCGXEICAYAACXXTGC

SEQ ID NO: 1255 - protein, 20 aa, Artificial Sequence
  Synthetically generated peptide
  VARIANT (1)...(20): Xaa = Any Amino Acid
PGXTCGXEICAYAACXTXGC

SEQ ID NO: 1256 - protein, 20 aa, Artificial Sequence
  Synthetically generated peptide
  VARIANT (1)...(20): Xaa = Any Amino Acid
PGXTCGXEICAYAACXTGXC

SEQ ID NO: 1257 - protein, 20 aa, Artificial Sequence
  Synthetically generated peptide
  VARIANT (1)...(20): Xaa = Any Amino Acid
PGXTCGXEICAYAACXTGCX

SEQ ID NO: 1258 - protein, 19 aa, Artificial Sequence
  Synthetically generated peptide
  VARIANT (1)...(19): Xaa = Any Amino Acid
PGXTCGXEICAYAACTXGC

SEQ ID NO: 1259 - protein, 20 aa, Artificial Sequence
  Synthetically generated peptide
  VARIANT (1)...(20): Xaa = Any Amino Acid
PGXTCGXEICAYAACTXXGC

SEQ ID NO: 1260 - protein, 20 aa, Artificial Sequence
  Synthetically generated peptide
  VARIANT (1)...(20): Xaa = Any Amino Acid
PGXTCGXEICAYAACTXGXC

SEQ ID NO: 1261 - protein, 20 aa, Artificial Sequence
  Synthetically generated peptide
  VARIANT (1)...(20): Xaa = Any Amino Acid
PGXTCGXEICAYAACTXGCX

SEQ ID NO: 1262 - protein, 19 aa, Artificial Sequence
  Synthetically generated peptide
  VARIANT (1)...(19): Xaa = Any Amino Acid
PGXTCGXEICAYAACTGXC

SEQ ID NO: 1263 - protein, 20 aa, Artificial Sequence
  Synthetically generated peptide
  VARIANT (1)...(20): Xaa = Any Amino Acid
PGXTCGXEICAYAACTGXXC

SEQ ID NO: 1264 - protein, 20 aa, Artificial Sequence
  Synthetically generated peptide
  VARIANT (1)...(20): Xaa = Any Amino Acid
PGXTCGXEICAYAACTGXCX

SEQ ID NO: 1265 - protein, 19 aa, Artificial Sequence
  Synthetically generated peptide
  VARIANT (1)...(19): Xaa = Any Amino Acid
PGXTCGXEICAYAACTGCX

SEQ ID NO: 1266 - protein, 20 aa, Artificial Sequence
  Synthetically generated peptide
  VARIANT (1)...(20): Xaa = Any Amino Acid
PGXTCGXEICAYAACTGCXX

SEQ ID NO: 1267 - protein, 18 aa, Artificial Sequence
  Synthetically generated peptide
  VARIANT (1)...(18): Xaa = Any Amino Acid
PGXTCGEXICAYAACTGC

SEQ ID NO: 1268 - protein, 19 aa, Artificial Sequence
  Synthetically generated peptide
  VARIANT (1)...(19): Xaa = Any Amino Acid
PGXTCGEXXICAYAACTGC

SEQ ID NO: 1269 - protein, 20 aa, Artificial Sequence
  Synthetically generated peptide
  VARIANT (1)...(20): Xaa = Any Amino Acid
PGXTCGEXXXICAYAACTGC

SEQ ID NO: 1270 - protein, 20 aa, Artificial Sequence
  Synthetically generated peptide
  VARIANT (1)...(20): Xaa = Any Amino Acid
PGXTCGEXXIXCAYAACTGC

SEQ ID NO: 1271 - protein, 20 aa, Artificial Sequence
  Synthetically generated peptide
  VARIANT (1)...(20): Xaa = Any Amino Acid
PGXTCGEXXICXAYAACTGC

SEQ ID NO: 1272 - protein, 20 aa, Artificial Sequence
  Synthetically generated peptide
  VARIANT (1)...(20): Xaa = Any Amino Acid
PGXTCGEXXICAXYAACTGC

SEQ ID NO: 1273 - protein, 20 aa, Artificial Sequence
  Synthetically generated peptide
  VARIANT (1)...(20): Xaa = Any Amino Acid
PGXTCGEXXICAYXAACTGC

SEQ ID NO: 1274 - protein, 20 aa, Artificial Sequence
  Synthetically generated peptide
  VARIANT (1)...(20): Xaa = Any Amino Acid
PGXTCGEXXICAYAXACTGC

SEQ ID NO: 1275 - protein, 20 aa, Artificial Sequence
  Synthetically generated peptide
  VARIANT (1)...(20): Xaa = Any Amino Acid
PGXTCGEXXICAYAAXCTGC

SEQ ID NO: 1276 - protein, 20 aa, Artificial Sequence
  Synthetically generated peptide
  VARIANT (1)...(20): Xaa = Any Amino Acid
PGXTCGEXXICAYAACXTGC

SEQ ID NO: 1277 - protein, 20 aa, Artificial Sequence
  Synthetically generated peptide
  VARIANT (1)...(20): Xaa = Any Amino Acid
PGXTCGEXXICAYAACTXGC

SEQ ID NO: 1278 - protein, 20 aa, Artificial Sequence
  Synthetically generated peptide
  VARIANT (1)...(20): Xaa = Any Amino Acid
PGXTCGEXXICAYAACTGXC

SEQ ID NO: 1279 - protein, 20 aa, Artificial Sequence
  Synthetically generated peptide
  VARIANT (1)...(20): Xaa = Any Amino Acid
PGXTCGEXXICAYAACTGCX

SEQ ID NO: 1280 - protein, 19 aa, Artificial Sequence
  Synthetically generated peptide
  VARIANT (1)...(19): Xaa = Any Amino Acid
PGXTCGEXIXCAYAACTGC

SEQ ID NO: 1281 - protein, 20 aa, Artificial Sequence
  Synthetically generated peptide
  VARIANT (1)...(20): Xaa = Any Amino Acid
PGXTCGEXIXXCAYAACTGC

SEQ ID NO: 1282 - protein, 20 aa, Artificial Sequence
  Synthetically generated peptide
  VARIANT (1)...(20): Xaa = Any Amino Acid
PGXTCGEXIXCXAYAACTGC

SEQ ID NO: 1283 - protein, 20 aa, Artificial Sequence
  Synthetically generated peptide
  VARIANT (1)...(20): Xaa = Any Amino Acid
PGXTCGEXIXCAXYAACTGC

SEQ ID NO: 1284 - protein, 20 aa, Artificial Sequence
  Synthetically generated peptide
  VARIANT (1)...(20): Xaa = Any Amino Acid
PGXTCGEXIXCAYXAACTGC

SEQ ID NO: 1285 - protein, 20 aa, Artificial Sequence
  Synthetically generated peptide
  VARIANT (1)...(20): Xaa = Any Amino Acid
PGXTCGEXIXCAYAXACTGC

SEQ ID NO: 1286 - protein, 20 aa, Artificial Sequence
  Synthetically generated peptide
  VARIANT (1)...(20): Xaa = Any Amino Acid
PGXTCGEXIXCAYAAXCTGC

SEQ ID NO: 1287 - protein, 20 aa, Artificial Sequence
  Synthetically generated peptide
  VARIANT (1)...(20): Xaa = Any Amino Acid
PGXTCGEXIXCAYAACXTGC

SEQ ID NO: 1288 - protein, 20 aa, Artificial Sequence
  Synthetically generated peptide
  VARIANT (1)...(20): Xaa = Any Amino Acid
PGXTCGEXIXCAYAACTXGC

SEQ ID NO: 1289 - protein, 20 aa, Artificial Sequence
  Synthetically generated peptide
  VARIANT (1)...(20): Xaa = Any Amino Acid
PGXTCGEXIXCAYAACTGXC

SEQ ID NO: 1290 - protein, 20 aa, Artificial Sequence
  Synthetically generated peptide
  VARIANT (1)...(20): Xaa = Any Amino Acid
PGXTCGEXIXCAYAACTGCX

SEQ ID NO: 1291 - protein, 19 aa, Artificial Sequence
  Synthetically generated peptide
  VARIANT (1)...(19): Xaa = Any Amino Acid
PGXTCGEXICXAYAACTGC

SEQ ID NO: 1292 - protein, 20 aa, Artificial Sequence
  Synthetically generated peptide
  VARIANT (1)...(20): Xaa = Any Amino Acid
PGXTCGEXICXXAYAACTGC

SEQ ID NO: 1293 - protein, 20 aa, Artificial Sequence
  Synthetically generated peptide
  VARIANT (1)...(20): Xaa = Any Amino Acid
PGXTCGEXICXAXYAACTGC

SEQ ID NO: 1294 - protein, 20 aa, Artificial Sequence
  Synthetically generated peptide
  VARIANT (1)...(20): Xaa = Any Amino Acid
PGXTCGEXICXAYXAACTGC

SEQ ID NO: 1295 - protein, 20 aa, Artificial Sequence
  Synthetically generated peptide
  VARIANT (1)...(20): Xaa = Any Amino Acid
PGXTCGEXICXAYAXACTGC

SEQ ID NO: 1296 - protein, 20 aa, Artificial Sequence
  Synthetically generated peptide
  VARIANT (1)...(20): Xaa = Any Amino Acid
PGXTCGEXICXAYAAXCTGC

SEQ ID NO: 1297 - protein, 20 aa, Artificial Sequence
  Synthetically generated peptide
  VARIANT (1)...(20): Xaa = Any Amino Acid
PGXTCGEXICXAYAACXTGC

SEQ ID NO: 1298 - protein, 20 aa, Artificial Sequence
  Synthetically generated peptide
  VARIANT (1)...(20): Xaa = Any Amino Acid
PGXTCGEXICXAYAACTXGC

SEQ ID NO: 1299 - protein, 20 aa, Artificial Sequence
  Synthetically generated peptide
  VARIANT (1)...(20): Xaa = Any Amino Acid
PGXTCGEXICXAYAACTGXC

SEQ ID NO: 1300 - protein, 20 aa, Artificial Sequence
  Synthetically generated peptide
  VARIANT (1)...(20): Xaa = Any Amino Acid
PGXTCGEXICXAYAACTGCX

SEQ ID NO: 1301 - protein, 19 aa, Artificial Sequence
  Synthetically generated peptide
  VARIANT (1)...(19): Xaa = Any Amino Acid
PGXTCGEXICAXYAACTGC

SEQ ID NO: 1302 - protein, 20 aa, Artificial Sequence
  Synthetically generated peptide
  VARIANT (1)...(20): Xaa = Any Amino Acid
PGXTCGEXICAXXYAACTGC

SEQ ID NO: 1303 - protein, 20 aa, Artificial Sequence
  Synthetically generated peptide
  VARIANT (1)...(20): Xaa = Any Amino Acid
PGXTCGEXICAXYXAACTGC

SEQ ID NO: 1304 - protein, 20 aa, Artificial Sequence
  Synthetically generated peptide
  VARIANT (1)...(20): Xaa = Any Amino Acid
PGXTCGEXICAXYAXACTGC

SEQ ID NO: 1305 - protein, 20 aa, Artificial Sequence
  Synthetically generated peptide
  VARIANT (1)...(20): Xaa = Any Amino Acid
PGXTCGEXICAXYAAXCTGC

SEQ ID NO: 1306 - protein, 20 aa, Artificial Sequence
  Synthetically generated peptide
  VARIANT (1)...(20): Xaa = Any Amino Acid
PGXTCGEXICAXYAACXTGC

SEQ ID NO: 1307 - protein, 20 aa, Artificial Sequence
  Synthetically generated peptide
  VARIANT (1)...(20): Xaa = Any Amino Acid
PGXTCGEXICAXYAACTXGC

SEQ ID NO: 1308 - protein, 20 aa, Artificial Sequence
  Synthetically generated peptide
  VARIANT (1)...(20): Xaa = Any Amino Acid
PGXTCGEXICAXYAACTGXC

SEQ ID NO: 1309 - protein, 20 aa, Artificial Sequence
  Synthetically generated peptide
  VARIANT (1)...(20): Xaa = Any Amino Acid
PGXTCGEXICAXYAACTGCX

SEQ ID NO: 1310 - protein, 19 aa, Artificial Sequence
  Synthetically generated peptide
  VARIANT (1)...(19): Xaa = Any Amino Acid
PGXTCGEXICAYXAACTGC

SEQ ID NO: 1311 - protein, 20 aa, Artificial Sequence
  Synthetically generated peptide
  VARIANT (1)...(20): Xaa = Any Amino Acid
PGXTCGEXICAYXXAACTGC

SEQ ID NO: 1312 - protein, 20 aa, Artificial Sequence
  Synthetically generated peptide
  VARIANT (1)...(20): Xaa = Any Amino Acid
PGXTCGEXICAYXAXACTGC

SEQ ID NO: 1313 - protein, 20 aa, Artificial Sequence
  Synthetically generated peptide
  VARIANT (1)...(20): Xaa = Any Amino Acid
PGXTCGEXICAYXAAXCTGC

SEQ ID NO: 1314 - protein, 20 aa, Artificial Sequence
  Synthetically generated peptide
  VARIANT (1)...(20): Xaa = Any Amino Acid
PGXTCGEXICAYXAACXTGC

SEQ ID NO: 1315 - protein, 20 aa, Artificial Sequence
  Synthetically generated peptide
  VARIANT (1)...(20): Xaa = Any Amino Acid
PGXTCGEXICAYXAACTXGC

SEQ ID NO: 1316 - protein, 20 aa, Artificial Sequence
  Synthetically generated peptide
  VARIANT (1)...(20): Xaa = Any Amino Acid
PGXTCGEXICAYXAACTGXC

SEQ ID NO: 1317 - protein, 20 aa, Artificial Sequence
  Synthetically generated peptide
  VARIANT (1)...(20): Xaa = Any Amino Acid
PGXTCGEXICAYXAACTGCX

SEQ ID NO: 1318 - protein, 19 aa, Artificial Sequence
  Synthetically generated peptide
  VARIANT (1)...(19): Xaa = Any Amino Acid
PGXTCGEXICAYAXACTGC

SEQ ID NO: 1319 - protein, 20 aa, Artificial Sequence
  Synthetically generated peptide
  VARIANT (1)...(20): Xaa = Any Amino Acid
PGXTCGEXICAYAXXACTGC

SEQ ID NO: 1320 - protein, 20 aa, Artificial Sequence
  Synthetically generated peptide
  VARIANT (1)...(20): Xaa = Any Amino Acid
PGXTCGEXICAYAXAXCTGC

SEQ ID NO: 1321 - protein, 20 aa, Artificial Sequence
  Synthetically generated peptide
  VARIANT (1)...(20): Xaa = Any Amino Acid
PGXTCGEXICAYAXACXTGC

SEQ ID NO: 1322 - protein, 20 aa, Artificial Sequence
  Synthetically generated peptide
  VARIANT (1)...(20): Xaa = Any Amino Acid
PGXTCGEXICAYAXACTXGC

SEQ ID NO: 1323 - protein, 20 aa, Artificial Sequence
  Synthetically generated peptide
  VARIANT (1)...(20): Xaa = Any Amino Acid
PGXTCGEXICAYAXACTGXC

SEQ ID NO: 1324 - protein, 20 aa, Artificial Sequence
  Synthetically generated peptide
  VARIANT (1)...(20): Xaa = Any Amino Acid
PGXTCGEXICAYAXACTGCX

SEQ ID NO: 1325 - protein, 19 aa, Artificial Sequence
  Synthetically generated peptide
  VARIANT (1)...(19): Xaa = Any Amino Acid
PGXTCGEXICAYAAXCTGC

SEQ ID NO: 1326 - protein, 20 aa, Artificial Sequence
  Synthetically generated peptide
  VARIANT (1)...(20): Xaa = Any Amino Acid
PGXTCGEXICAYAAXXCTGC

SEQ ID NO: 1327 - protein, 20 aa, Artificial Sequence
  Synthetically generated peptide
  VARIANT (1)...(20): Xaa = Any Amino Acid
PGXTCGEXICAYAAXCXTGC

SEQ ID NO: 1328 - protein, 20 aa, Artificial Sequence
  Synthetically generated peptide
  VARIANT (1)...(20): Xaa = Any Amino Acid
PGXTCGEXICAYAAXCTXGC

SEQ ID NO: 1329 - protein, 20 aa, Artificial Sequence
  Synthetically generated peptide
  VARIANT (1)...(20): Xaa = Any Amino Acid
PGXTCGEXICAYAAXCTGXC

SEQ ID NO: 1330 - protein, 20 aa, Artificial Sequence
  Synthetically generated peptide
  VARIANT (1)...(20): Xaa = Any Amino Acid
PGXTCGEXICAYAAXCTGCX

SEQ ID NO: 1331 - protein, 19 aa, Artificial Sequence
  Synthetically generated peptide
  VARIANT (1)...(19): Xaa = Any Amino Acid
PGXTCGEXICAYAACXTGC

SEQ ID NO: 1332 - protein, 20 aa, Artificial Sequence
  Synthetically generated peptide
  VARIANT (1)...(20): Xaa = Any Amino Acid
PGXTCGEXICAYAACXXTGC

SEQ ID NO: 1333 - protein, 20 aa, Artificial Sequence
  Synthetically generated peptide
  VARIANT (1)...(20): Xaa = Any Amino Acid
PGXTCGEXICAYAACXTXGC

SEQ ID NO: 1334 - protein, 20 aa, Artificial Sequence
  Synthetically generated peptide
  VARIANT (1)...(20): Xaa = Any Amino Acid
PGXTCGEXICAYAACXTGXC

SEQ ID NO: 1335 - protein, 20 aa, Artificial Sequence
  Synthetically generated peptide
  VARIANT (1)...(20): Xaa = Any Amino Acid
PGXTCGEXICAYAACXTGCX

SEQ ID NO: 1336 - protein, 19 aa, Artificial Sequence
  Synthetically generated peptide
  VARIANT (1)...(19): Xaa = Any Amino Acid
PGXTCGEXICAYAACTXGC

SEQ ID NO: 1337 - protein, 20 aa, Artificial Sequence
  Synthetically generated peptide
  VARIANT (1)...(20): Xaa = Any Amino Acid
PGXTCGEXICAYAACTXXGC

SEQ ID NO: 1338 - protein, 20 aa, Artificial Sequence
  Synthetically generated peptide
  VARIANT (1)...(20): Xaa = Any Amino Acid
PGXTCGEXICAYAACTXGXC

SEQ ID NO: 1339 - protein, 20 aa, Artificial Sequence
  Synthetically generated peptide
  VARIANT (1)...(20): Xaa = Any Amino Acid
PGXTCGEXICAYAACTXGCX

SEQ ID NO: 1340 - protein, 19 aa, Artificial Sequence
  Synthetically generated peptide
  VARIANT (1)...(19): Xaa = Any Amino Acid
PGXTCGEXICAYAACTGXC

SEQ ID NO: 1341 - protein, 20 aa, Artificial Sequence
  Synthetically generated peptide
  VARIANT (1)...(20): Xaa = Any Amino Acid
PGXTCGEXICAYAACTGXXC

SEQ ID NO: 1342 - protein, 20 aa, Artificial Sequence
  Synthetically generated peptide
  VARIANT (1)...(20): Xaa = Any Amino Acid
PGXTCGEXICAYAACTGXCX

SEQ ID NO: 1343 - protein, 19 aa, Artificial Sequence
  Synthetically generated peptide
  VARIANT (1)...(19): Xaa = Any Amino Acid
PGXTCGEXICAYAACTGCX

SEQ ID NO: 1344 - protein, 20 aa, Artificial Sequence
  Synthetically generated peptide
  VARIANT (1)...(20): Xaa = Any Amino Acid
PGXTCGEXICAYAACTGCXX

SEQ ID NO: 1345 - protein, 18 aa, Artificial Sequence
  Synthetically generated peptide
  VARIANT (1)...(18): Xaa = Any Amino Acid
PGXTCGEIXCAYAACTGC

SEQ ID NO: 1346 - protein, 19 aa, Artificial Sequence
  Synthetically generated peptide
  VARIANT (1)...(19): Xaa = Any Amino Acid
PGXTCGEIXXCAYAACTGC

SEQ ID NO: 1347 - protein, 20 aa, Artificial Sequence
  Synthetically generated peptide
  VARIANT (1)...(20): Xaa = Any Amino Acid
PGXTCGEIXXXCAYAACTGC

SEQ ID NO: 1348 - protein, 20 aa, Artificial Sequence
  Synthetically generated peptide
  VARIANT (1)...(20): Xaa = Any Amino Acid
PGXTCGEIXXCXAYAACTGC

SEQ ID NO: 1349 - protein, 20 aa, Artificial Sequence
  Synthetically generated peptide
  VARIANT (1)...(20): Xaa = Any Amino Acid
PGXTCGEIXXCAXYAACTGC

SEQ ID NO: 1350 - protein, 20 aa, Artificial Sequence
  Synthetically generated peptide
  VARIANT (1)...(20): Xaa = Any Amino Acid
PGXTCGEIXXCAYXAACTGC

SEQ ID NO: 1351 - protein, 20 aa, Artificial Sequence
  Synthetically generated peptide
  VARIANT (1)...(20): Xaa = Any Amino Acid
PGXTCGEIXXCAYAXACTGC

SEQ ID NO: 1352 - protein, 20 aa, Artificial Sequence
  Synthetically generated peptide
  VARIANT (1)...(20): Xaa = Any Amino Acid
PGXTCGEIXXCAYAAXCTGC

SEQ ID NO: 1353 - protein, 20 aa, Artificial Sequence
  Synthetically generated peptide
  VARIANT (1)...(20): Xaa = Any Amino Acid
PGXTCGEIXXCAYAACXTGC

SEQ ID NO: 1354 - protein, 20 aa, Artificial Sequence
  Synthetically generated peptide
  VARIANT (1)...(20): Xaa = Any Amino Acid
PGXTCGEIXXCAYAACTXGC

SEQ ID NO: 1355 - protein, 20 aa, Artificial Sequence
  Synthetically generated peptide
  VARIANT (1)...(20): Xaa = Any Amino Acid
PGXTCGEIXXCAYAACTGXC

SEQ ID NO: 1356 - protein, 20 aa, Artificial Sequence
  Synthetically generated peptide
  VARIANT (1)...(20): Xaa = Any Amino Acid
PGXTCGEIXXCAYAACTGCX

SEQ ID NO: 1357 - protein, 19 aa, Artificial Sequence
  Synthetically generated peptide
  VARIANT (1)...(19): Xaa = Any Amino Acid
PGXTCGEIXCXAYAACTGC

SEQ ID NO: 1358 - protein, 20 aa, Artificial Sequence
  Synthetically generated peptide
  VARIANT (1)...(20): Xaa = Any Amino Acid
PGXTCGEIXCXXAYAACTGC

SEQ ID NO: 1359 - protein, 20 aa, Artificial Sequence
  Synthetically generated peptide
  VARIANT (1)...(20): Xaa = Any Amino Acid
PGXTCGEIXCXAXYAACTGC

SEQ ID NO: 1360 - protein, 20 aa, Artificial Sequence
  Synthetically generated peptide
  VARIANT (1)...(20): Xaa = Any Amino Acid
PGXTCGEIXCXAYXAACTGC

SEQ ID NO: 1361 - protein, 20 aa, Artificial Sequence
  Synthetically generated peptide
  VARIANT (1)...(20): Xaa = Any Amino Acid
PGXTCGEIXCXAYAXACTGC

SEQ ID NO: 1362 - protein, 20 aa, Artificial Sequence
  Synthetically generated peptide
  VARIANT (1)...(20): Xaa = Any Amino Acid
PGXTCGEIXCXAYAAXCTGC

SEQ ID NO: 1363 - protein, 20 aa, Artificial Sequence
  Synthetically generated peptide
  VARIANT (1)...(20): Xaa = Any Amino Acid
PGXTCGEIXCXAYAACXTGC

SEQ ID NO: 1364 - protein, 20 aa, Artificial Sequence
  Synthetically generated peptide
  VARIANT (1)...(20): Xaa = Any Amino Acid
PGXTCGEIXCXAYAACTXGC

SEQ ID NO: 1365 - protein, 20 aa, Artificial Sequence
  Synthetically generated peptide
  VARIANT (1)...(20): Xaa = Any Amino Acid
PGXTCGEIXCXAYAACTGXC

SEQ ID NO: 1366 - protein, 20 aa, Artificial Sequence
  Synthetically generated peptide
  VARIANT (1)...(20): Xaa = Any Amino Acid
PGXTCGEIXCXAYAACTGCX

SEQ ID NO: 1367 - protein, 19 aa, Artificial Sequence
  Synthetically generated peptide
  VARIANT (1)...(19): Xaa = Any Amino Acid
PGXTCGEIXCAXYAACTGC

SEQ ID NO: 1368 - protein, 20 aa, Artificial Sequence
  Synthetically generated peptide
  VARIANT (1)...(20): Xaa = Any Amino Acid
PGXTCGEIXCAXXYAACTGC

SEQ ID NO: 1369 - protein, 20 aa, Artificial Sequence
  Synthetically generated peptide
  VARIANT (1)...(20): Xaa = Any Amino Acid
PGXTCGEIXCAXYXAACTGC

SEQ ID NO: 1370 - protein, 20 aa, Artificial Sequence
  Synthetically generated peptide
  VARIANT (1)...(20): Xaa = Any Amino Acid
PGXTCGEIXCAXYAXACTGC

SEQ ID NO: 1371 - protein, 20 aa, Artificial Sequence
  Synthetically generated peptide
  VARIANT (1)...(20): Xaa = Any Amino Acid
PGXTCGEIXCAXYAAXCTGC

SEQ ID NO: 1372 - protein, 20 aa, Artificial Sequence
  Synthetically generated peptide
  VARIANT (1)...(20): Xaa = Any Amino Acid
PGXTCGEIXCAXYAACXTGC

SEQ ID NO: 1373 - protein, 20 aa, Artificial Sequence
  Synthetically generated peptide
  VARIANT (1)...(20): Xaa = Any Amino Acid
PGXTCGEIXCAXYAACTXGC

SEQ ID NO: 1374 - protein, 20 aa, Artificial Sequence
  Synthetically generated peptide
  VARIANT (1)...(20): Xaa = Any Amino Acid
PGXTCGEIXCAXYAACTGXC

SEQ ID NO: 1375 - protein, 20 aa, Artificial Sequence
  Synthetically generated peptide
  VARIANT (1)...(20): Xaa = Any Amino Acid
PGXTCGEIXCAXYAACTGCX

SEQ ID NO: 1376 - protein, 19 aa, Artificial Sequence
  Synthetically generated peptide
  VARIANT (1)...(19): Xaa = Any Amino Acid
PGXTCGEIXCAYXAACTGC

SEQ ID NO: 1377 - protein, 20 aa, Artificial Sequence
  Synthetically generated peptide
  VARIANT (1)...(20): Xaa = Any Amino Acid
PGXTCGEIXCAYXXAACTGC

SEQ ID NO: 1378 - protein, 20 aa, Artificial Sequence
  Synthetically generated peptide
  VARIANT (1)...(20): Xaa = Any Amino Acid
PGXTCGEIXCAYXAXACTGC

SEQ ID NO: 1379 - protein, 20 aa, Artificial Sequence
  Synthetically generated peptide
  VARIANT (1)...(20): Xaa = Any Amino Acid
PGXTCGEIXCAYXAAXCTGC

SEQ ID NO: 1380 - protein, 20 aa, Artificial Sequence
  Synthetically generated peptide
  VARIANT (1)...(20): Xaa = Any Amino Acid
PGXTCGEIXCAYXAACXTGC

SEQ ID NO: 1381 - protein, 20 aa, Artificial Sequence
  Synthetically generated peptide
  VARIANT (1)...(20): Xaa = Any Amino Acid
PGXTCGEIXCAYXAACTXGC

SEQ ID NO: 1382 - protein, 20 aa, Artificial Sequence
  Synthetically generated peptide
  VARIANT (1)...(20): Xaa = Any Amino Acid
PGXTCGEIXCAYXAACTGXC

SEQ ID NO: 1383 - protein, 20 aa, Artificial Sequence
  Synthetically generated peptide
  VARIANT (1)...(20): Xaa = Any Amino Acid
PGXTCGEIXCAYXAACTGCX

SEQ ID NO: 1384 - protein, 19 aa, Artificial Sequence
  Synthetically generated peptide
  VARIANT (1)...(19): Xaa = Any Amino Acid
PGXTCGEIXCAYAXACTGC

SEQ ID NO: 1385 - protein, 20 aa, Artificial Sequence
  Synthetically generated peptide
  VARIANT (1)...(20): Xaa = Any Amino Acid
PGXTCGEIXCAYAXXACTGC

SEQ ID NO: 1386 - protein, 20 aa, Artificial Sequence
  Synthetically generated peptide
  VARIANT (1)...(20): Xaa = Any Amino Acid
PGXTCGEIXCAYAXAXCTGC

SEQ ID NO: 1387 - protein, 20 aa, Artificial Sequence
  Synthetically generated peptide
  VARIANT (1)...(20): Xaa = Any Amino Acid
PGXTCGEIXCAYAXACXTGC

SEQ ID NO: 1388 - protein, 20 aa, Artificial Sequence
  Synthetically generated peptide
  VARIANT (1)...(20): Xaa = Any Amino Acid
PGXTCGEIXCAYAXACTXGC

SEQ ID NO: 1389 - protein, 20 aa, Artificial Sequence
  Synthetically generated peptide
  VARIANT (1)...(20): Xaa = Any Amino Acid
PGXTCGEIXCAYAXACTGXC

SEQ ID NO: 1390 - protein, 20 aa, Artificial Sequence
  Synthetically generated peptide
  VARIANT (1)...(20): Xaa = Any Amino Acid
PGXTCGEIXCAYAXACTGCX

SEQ ID NO: 1391 - protein, 19 aa, Artificial Sequence
  Synthetically generated peptide
  VARIANT (1)...(19): Xaa = Any Amino Acid
PGXTCGEIXCAYAAXCTGC

SEQ ID NO: 1392 - protein, 20 aa, Artificial Sequence
  Synthetically generated peptide
  VARIANT (1)...(20): Xaa = Any Amino Acid
PGXTCGEIXCAYAAXXCTGC

SEQ ID NO: 1393 - protein, 20 aa, Artificial Sequence
  Synthetically generated peptide
  VARIANT (1)...(20): Xaa = Any Amino Acid
PGXTCGEIXCAYAAXCXTGC

SEQ ID NO: 1394 - protein, 20 aa, Artificial Sequence
  Synthetically generated peptide
  VARIANT (1)...(20): Xaa = Any Amino Acid
PGXTCGEIXCAYAAXCTXGC

SEQ ID NO: 1395 - protein, 20 aa, Artificial Sequence
  Synthetically generated peptide
  VARIANT (1)...(20): Xaa = Any Amino Acid
PGXTCGEIXCAYAAXCTGXC

SEQ ID NO: 1396 - protein, 20 aa, Artificial Sequence
  Synthetically generated peptide
  VARIANT (1)...(20): Xaa = Any Amino Acid
PGXTCGEIXCAYAAXCTGCX

SEQ ID NO: 1397 - protein, 19 aa, Artificial Sequence
  Synthetically generated peptide
  VARIANT (1)...(19): Xaa = Any Amino Acid
PGXTCGEIXCAYAACXTGC

SEQ ID NO: 1398 - protein, 20 aa, Artificial Sequence
  Synthetically generated peptide
  VARIANT (1)...(20): Xaa = Any Amino Acid
PGXTCGEIXCAYAACXXTGC

SEQ ID NO: 1399 - protein, 20 aa, Artificial Sequence
  Synthetically generated peptide
  VARIANT (1)...(20): Xaa = Any Amino Acid
PGXTCGEIXCAYAACXTXGC

SEQ ID NO: 1400 - protein, 20 aa, Artificial Sequence
  Synthetically generated peptide
  VARIANT (1)...(20): Xaa = Any Amino Acid
PGXTCGEIXCAYAACXTGXC

SEQ ID NO: 1401 - protein, 20 aa, Artificial Sequence
  Synthetically generated peptide
  VARIANT (1)...(20): Xaa = Any Amino Acid
PGXTCGEIXCAYAACXTGCX

SEQ ID NO: 1402 - protein, 19 aa, Artificial Sequence
  Synthetically generated peptide
  VARIANT (1)...(19): Xaa = Any Amino Acid
PGXTCGEIXCAYAACTXGC

SEQ ID NO: 1403 - protein, 20 aa, Artificial Sequence
  Synthetically generated peptide
  VARIANT (1)...(20): Xaa = Any Amino Acid
PGXTCGEIXCAYAACTXXGC

SEQ ID NO: 1404 - protein, 20 aa, Artificial Sequence
  Synthetically generated peptide
  VARIANT (1)...(20): Xaa = Any Amino Acid
PGXTCGEIXCAYAACTXGXC

SEQ ID NO: 1405 - protein, 20 aa, Artificial Sequence
  Synthetically generated peptide
  VARIANT (1)...(20): Xaa = Any Amino Acid
PGXTCGEIXCAYAACTXGCX

SEQ ID NO: 1406 - protein, 19 aa, Artificial Sequence
  Synthetically generated peptide
  VARIANT (1)...(19): Xaa = Any Amino Acid
PGXTCGEIXCAYAACTGXC

SEQ ID NO: 1407 - protein, 20 aa, Artificial Sequence
  Synthetically generated peptide
  VARIANT (1)...(20): Xaa = Any Amino Acid
PGXTCGEIXCAYAACTGXXC

SEQ ID NO: 1408 - protein, 20 aa, Artificial Sequence
  Synthetically generated peptide
  VARIANT (1)...(20): Xaa = Any Amino Acid
PGXTCGEIXCAYAACTGXCX

SEQ ID NO: 1409 - protein, 19 aa, Artificial Sequence
  Synthetically generated peptide
  VARIANT (1)...(19): Xaa = Any Amino Acid
PGXTCGEIXCAYAACTGCX

SEQ ID NO: 1410 - protein, 20 aa, Artificial Sequence
  Synthetically generated peptide
  VARIANT (1)...(20): Xaa = Any Amino Acid
PGXTCGEIXCAYAACTGCXX

SEQ ID NO: 1411 - protein, 18 aa, Artificial Sequence
  Synthetically generated peptide
  VARIANT (1)...(18): Xaa = Any Amino Acid
PGXTCGEICXAYAACTGC

SEQ ID NO: 1412 - protein, 19 aa, Artificial Sequence
  Synthetically generated peptide
  VARIANT (1)...(19): Xaa = Any Amino Acid
PGXTCGEICXXAYAACTGC

SEQ ID NO: 1413 - protein, 20 aa, Artificial Sequence
  Synthetically generated peptide
  VARIANT (1)...(20): Xaa = Any Amino Acid
PGXTCGEICXXXAYAACTGC

SEQ ID NO: 1414 - protein, 20 aa, Artificial Sequence
  Synthetically generated peptide
  VARIANT (1)...(20): Xaa = Any Amino Acid
PGXTCGEICXXAXYAACTGC

SEQ ID NO: 1415 - protein, 20 aa, Artificial Sequence
  Synthetically generated peptide
  VARIANT (1)...(20): Xaa = Any Amino Acid
PGXTCGEICXXAYXAACTGC

SEQ ID NO: 1416 - protein, 20 aa, Artificial Sequence
  Synthetically generated peptide
  VARIANT (1)...(20): Xaa = Any Amino Acid
PGXTCGEICXXAYAXACTGC

SEQ ID NO: 1417 - protein, 20 aa, Artificial Sequence
  Synthetically generated peptide
  VARIANT (1)...(20): Xaa = Any Amino Acid
PGXTCGEICXXAYAAXCTGC

SEQ ID NO: 1418 - protein, 20 aa, Artificial Sequence
  Synthetically generated peptide
  VARIANT (1)...(20): Xaa = Any Amino Acid
PGXTCGEICXXAYAACXTGC

SEQ ID NO: 1419 - protein, 20 aa, Artificial Sequence
  Synthetically generated peptide
  VARIANT (1)...(20): Xaa = Any Amino Acid
PGXTCGEICXXAYAACTXGC

SEQ ID NO: 1420 - protein, 20 aa, Artificial Sequence
  Synthetically generated peptide
  VARIANT (1)...(20): Xaa = Any Amino Acid
PGXTCGEICXXAYAACTGXC

SEQ ID NO: 1421 - protein, 20 aa, Artificial Sequence
  Synthetically generated peptide
  VARIANT (1)...(20): Xaa = Any Amino Acid
PGXTCGEICXXAYAACTGCX

SEQ ID NO: 1422 - protein, 19 aa, Artificial Sequence
  Synthetically generated peptide
  VARIANT (1)...(19): Xaa = Any Amino Acid
PGXTCGEICXAXYAACTGC

SEQ ID NO: 1423 - protein, 20 aa, Artificial Sequence
  Synthetically generated peptide
  VARIANT (1)...(20): Xaa = Any Amino Acid
PGXTCGEICXAXXYAACTGC

SEQ ID NO: 1424 - protein, 20 aa, Artificial Sequence
  Synthetically generated peptide
  VARIANT (1)...(20): Xaa = Any Amino Acid
PGXTCGEICXAXYXAACTGC

SEQ ID NO: 1425 - protein, 20 aa, Artificial Sequence
  Synthetically generated peptide
  VARIANT (1)...(20): Xaa = Any Amino Acid
PGXTCGEICXAXYAXACTGC

SEQ ID NO: 1426 - protein, 20 aa, Artificial Sequence
  Synthetically generated peptide
  VARIANT (1)...(20): Xaa = Any Amino Acid
PGXTCGEICXAXYAAXCTGC

SEQ ID NO: 1427 - protein, 20 aa, Artificial Sequence
  Synthetically generated peptide
  VARIANT (1)...(20): Xaa = Any Amino Acid
PGXTCGEICXAXYAACXTGC

SEQ ID NO: 1428 - protein, 20 aa, Artificial Sequence
  Synthetically generated peptide
  VARIANT (1)...(20): Xaa = Any Amino Acid
PGXTCGEICXAXYAACTXGC

SEQ ID NO: 1429 - protein, 20 aa, Artificial Sequence
  Synthetically generated peptide
  VARIANT (1)...(20): Xaa = Any Amino Acid
PGXTCGEICXAXYAACTGXC

SEQ ID NO: 1430 - protein, 20 aa, Artificial Sequence
  Synthetically generated peptide
  VARIANT (1)...(20): Xaa = Any Amino Acid
PGXTCGEICXAXYAACTGCX

SEQ ID NO: 1431 - protein, 19 aa, Artificial Sequence
  Synthetically generated peptide
  VARIANT (1)...(19): Xaa = Any Amino Acid
PGXTCGEICXAYXAACTGC

SEQ ID NO: 1432 - protein, 20 aa, Artificial Sequence
  Synthetically generated peptide
  VARIANT (1)...(20): Xaa = Any Amino Acid
PGXTCGEICXAYXXAACTGC

SEQ ID NO: 1433 - protein, 20 aa, Artificial Sequence
  Synthetically generated peptide
  VARIANT (1)...(20): Xaa = Any Amino Acid
PGXTCGEICXAYXAXACTGC

SEQ ID NO: 1434 - protein, 20 aa, Artificial Sequence
  Synthetically generated peptide
  VARIANT (1)...(20): Xaa = Any Amino Acid
PGXTCGEICXAYXAAXCTGC

SEQ ID NO: 1435 - protein, 20 aa, Artificial Sequence
  Synthetically generated peptide
  VARIANT (1)...(20): Xaa = Any Amino Acid
PGXTCGEICXAYXAACXTGC

SEQ ID NO: 1436 - protein, 20 aa, Artificial Sequence
  Synthetically generated peptide
  VARIANT (1)...(20): Xaa = Any Amino Acid
PGXTCGEICXAYXAACTXGC

SEQ ID NO: 1437 - protein, 20 aa, Artificial Sequence
  Synthetically generated peptide
  VARIANT (1)...(20): Xaa = Any Amino Acid
PGXTCGEICXAYXAACTGXC

SEQ ID NO: 1438 - protein, 20 aa, Artificial Sequence
  Synthetically generated peptide
  VARIANT (1)...(20): Xaa = Any Amino Acid
PGXTCGEICXAYXAACTGCX

SEQ ID NO: 1439 - protein, 19 aa, Artificial Sequence
  Synthetically generated peptide
  VARIANT (1)...(19): Xaa = Any Amino Acid
PGXTCGEICXAYAXACTGC

SEQ ID NO: 1440 - protein, 20 aa, Artificial Sequence
  Synthetically generated peptide
  VARIANT (1)...(20): Xaa = Any Amino Acid
PGXTCGEICXAYAXXACTGC

SEQ ID NO: 1441 - protein, 20 aa, Artificial Sequence
  Synthetically generated peptide
  VARIANT (1)...(20): Xaa = Any Amino Acid
PGXTCGEICXAYAXAXCTGC

SEQ ID NO: 1442 - protein, 20 aa, Artificial Sequence
  Synthetically generated peptide
  VARIANT (1)...(20): Xaa = Any Amino Acid
PGXTCGEICXAYAXACXTGC

SEQ ID NO: 1443 - protein, 20 aa, Artificial Sequence
  Synthetically generated peptide
  VARIANT (1)...(20): Xaa = Any Amino Acid
PGXTCGEICXAYAXACTXGC

SEQ ID NO: 1444 - protein, 20 aa, Artificial Sequence
  Synthetically generated peptide
  VARIANT (1)...(20): Xaa = Any Amino Acid
PGXTCGEICXAYAXACTGXC

SEQ ID NO: 1445 - protein, 20 aa, Artificial Sequence
  Synthetically generated peptide
  VARIANT (1)...(20): Xaa = Any Amino Acid
PGXTCGEICXAYAXACTGCX

SEQ ID NO: 1446 - protein, 19 aa, Artificial Sequence
  Synthetically generated peptide
  VARIANT (1)...(19): Xaa = Any Amino Acid
PGXTCGEICXAYAAXCTGC

SEQ ID NO: 1447 - protein, 20 aa, Artificial Sequence
  Synthetically generated peptide
  VARIANT (1)...(20): Xaa = Any Amino Acid
PGXTCGEICXAYAAXXCTGC

SEQ ID NO: 1448 - protein, 20 aa, Artificial Sequence
  Synthetically generated peptide
  VARIANT (1)...(20): Xaa = Any Amino Acid
PGXTCGEICXAYAAXCXTGC

SEQ ID NO: 1449 - protein, 20 aa, Artificial Sequence
  Synthetically generated peptide
  VARIANT (1)...(20): Xaa = Any Amino Acid
PGXTCGEICXAYAAXCTXGC

SEQ ID NO: 1450 - protein, 20 aa, Artificial Sequence
  Synthetically generated peptide
  VARIANT (1)...(20): Xaa = Any Amino Acid
PGXTCGEICXAYAAXCTGXC

SEQ ID NO: 1451 - protein, 20 aa, Artificial Sequence
  Synthetically generated peptide
  VARIANT (1)...(20): Xaa = Any Amino Acid
PGXTCGEICXAYAAXCTGCX

SEQ ID NO: 1452 - protein, 19 aa, Artificial Sequence
  Synthetically generated peptide
  VARIANT (1)...(19): Xaa = Any Amino Acid
PGXTCGEICXAYAACXTGC

SEQ ID NO: 1453 - protein, 20 aa, Artificial Sequence
  Synthetically generated peptide
  VARIANT (1)...(20): Xaa = Any Amino Acid
PGXTCGEICXAYAACXXTGC

SEQ ID NO: 1454 - protein, 20 aa, Artificial Sequence
  Synthetically generated peptide
  VARIANT (1)...(20): Xaa = Any Amino Acid
PGXTCGEICXAYAACXTXGC

SEQ ID NO: 1455 - protein, 20 aa, Artificial Sequence
  Synthetically generated peptide
  VARIANT (1)...(20): Xaa = Any Amino Acid
PGXTCGEICXAYAACXTGXC

SEQ ID NO: 1456 - protein, 20 aa, Artificial Sequence
  Synthetically generated peptide
  VARIANT (1)...(20): Xaa = Any Amino Acid
PGXTCGEICXAYAACXTGCX

SEQ ID NO: 1457 - protein, 19 aa, Artificial Sequence
  Synthetically generated peptide
  VARIANT (1)...(19): Xaa = Any Amino Acid
PGXTCGEICXAYAACTXGC

SEQ ID NO: 1458 - protein, 20 aa, Artificial Sequence
  Synthetically generated peptide
  VARIANT (1)...(20): Xaa = Any Amino Acid
PGXTCGEICXAYAACTXXGC

SEQ ID NO: 1459 - protein, 20 aa, Artificial Sequence
  Synthetically generated peptide
  VARIANT (1)...(20): Xaa = Any Amino Acid
PGXTCGEICXAYAACTXGXC

SEQ ID NO: 1460 - protein, 20 aa, Artificial Sequence
  Synthetically generated peptide
  VARIANT (1)...(20): Xaa = Any Amino Acid
PGXTCGEICXAYAACTXGCX

SEQ ID NO: 1461 - protein, 19 aa, Artificial Sequence
  Synthetically generated peptide
  VARIANT (1)...(19): Xaa = Any Amino Acid
PGXTCGEICXAYAACTGXC

SEQ ID NO: 1462 - protein, 20 aa, Artificial Sequence
  Synthetically generated peptide
  VARIANT (1)...(20): Xaa = Any Amino Acid
PGXTCGEICXAYAACTGXXC

SEQ ID NO: 1463 - protein, 20 aa, Artificial Sequence
  Synthetically generated peptide
  VARIANT (1)...(20): Xaa = Any Amino Acid
PGXTCGEICXAYAACTGXCX

SEQ ID NO: 1464 - protein, 19 aa, Artificial Sequence
  Synthetically generated peptide
  VARIANT (1)...(19): Xaa = Any Amino Acid
PGXTCGEICXAYAACTGCX

SEQ ID NO: 1465 - protein, 20 aa, Artificial Sequence
  Synthetically generated peptide
  VARIANT (1)...(20): Xaa = Any Amino Acid
PGXTCGEICXAYAACTGCXX

SEQ ID NO: 1466 - protein, 18 aa, Artificial Sequence
  Synthetically generated peptide
  VARIANT (1)...(18): Xaa = Any Amino Acid
PGXTCGEICAXYAACTGC

SEQ ID NO: 1467 - protein, 19 aa, Artificial Sequence
  Synthetically generated peptide
  VARIANT (1)...(19): Xaa = Any Amino Acid
PGXTCGEICAXXYAACTGC

SEQ ID NO: 1468 - protein, 20 aa, Artificial Sequence
  Synthetically generated peptide
  VARIANT (1)...(20): Xaa = Any Amino Acid
PGXTCGEICAXXXYAACTGC

SEQ ID NO: 1469 - protein, 20 aa, Artificial Sequence
  Synthetically generated peptide
  VARIANT (1)...(20): Xaa = Any Amino Acid
PGXTCGEICAXXYXAACTGC

SEQ ID NO: 1470 - protein, 20 aa, Artificial Sequence
  Synthetically generated peptide
  VARIANT (1)...(20): Xaa = Any Amino Acid
PGXTCGEICAXXYAXACTGC

SEQ ID NO: 1471 - protein, 20 aa, Artificial Sequence
  Synthetically generated peptide
  VARIANT (1)...(20): Xaa = Any Amino Acid
PGXTCGEICAXXYAAXCTGC

SEQ ID NO: 1472 - protein, 20 aa, Artificial Sequence
  Synthetically generated peptide
  VARIANT (1)...(20): Xaa = Any Amino Acid
PGXTCGEICAXXYAACXTGC

SEQ ID NO: 1473 - protein, 20 aa, Artificial Sequence
  Synthetically generated peptide
  VARIANT (1)...(20): Xaa = Any Amino Acid
PGXTCGEICAXXYAACTXGC

SEQ ID NO: 1474 - protein, 20 aa, Artificial Sequence
  Synthetically generated peptide
  VARIANT (1)...(20): Xaa = Any Amino Acid
PGXTCGEICAXXYAACTGXC

SEQ ID NO: 1475 - protein, 20 aa, Artificial Sequence
  Synthetically generated peptide
  VARIANT (1)...(20): Xaa = Any Amino Acid
PGXTCGEICAXXYAACTGCX

SEQ ID NO: 1476 - protein, 19 aa, Artificial Sequence
  Synthetically generated peptide
  VARIANT (1)...(19): Xaa = Any Amino Acid
PGXTCGEICAXYXAACTGC

SEQ ID NO: 1477 - protein, 20 aa, Artificial Sequence
  Synthetically generated peptide
  VARIANT (1)...(20): Xaa = Any Amino Acid
PGXTCGEICAXYXXAACTGC

SEQ ID NO: 1478 - protein, 20 aa, Artificial Sequence
  Synthetically generated peptide
  VARIANT (1)...(20): Xaa = Any Amino Acid
PGXTCGEICAXYXAXACTGC

SEQ ID NO: 1479 - protein, 20 aa, Artificial Sequence
  Synthetically generated peptide
  VARIANT (1)...(20): Xaa = Any Amino Acid
PGXTCGEICAXYXAAXCTGC

SEQ ID NO: 1480 - protein, 20 aa, Artificial Sequence
  Synthetically generated peptide
  VARIANT (1)...(20): Xaa = Any Amino Acid
PGXTCGEICAXYXAACXTGC

SEQ ID NO: 1481 - protein, 20 aa, Artificial Sequence
  Synthetically generated peptide
  VARIANT (1)...(20): Xaa = Any Amino Acid
PGXTCGEICAXYXAACTXGC

SEQ ID NO: 1482 - protein, 20 aa, Artificial Sequence
  Synthetically generated peptide
  VARIANT (1)...(20): Xaa = Any Amino Acid
PGXTCGEICAXYXAACTGXC

SEQ ID NO: 1483 - protein, 20 aa, Artificial Sequence
  Synthetically generated peptide
  VARIANT (1)...(20): Xaa = Any Amino Acid
PGXTCGEICAXYXAACTGCX

SEQ ID NO: 1484 - protein, 19 aa, Artificial Sequence
  Synthetically generated peptide
  VARIANT (1)...(19): Xaa = Any Amino Acid
PGXTCGEICAXYAXACTGC

SEQ ID NO: 1485 - protein, 20 aa, Artificial Sequence
  Synthetically generated peptide
  VARIANT (1)...(20): Xaa = Any Amino Acid
PGXTCGEICAXYAXXACTGC

SEQ ID NO: 1486 - protein, 20 aa, Artificial Sequence
  Synthetically generated peptide
  VARIANT (1)...(20): Xaa = Any Amino Acid
PGXTCGEICAXYAXAXCTGC

SEQ ID NO: 1487 - protein, 20 aa, Artificial Sequence
  Synthetically generated peptide
  VARIANT (1)...(20): Xaa = Any Amino Acid
PGXTCGEICAXYAXACXTGC

SEQ ID NO: 1488 - protein, 20 aa, Artificial Sequence
  Synthetically generated peptide
  VARIANT (1)...(20): Xaa = Any Amino Acid
PGXTCGEICAXYAXACTXGC

SEQ ID NO: 1489 - protein, 20 aa, Artificial Sequence
  Synthetically generated peptide
  VARIANT (1)...(20): Xaa = Any Amino Acid
PGXTCGEICAXYAXACTGXC

SEQ ID NO: 1490 - protein, 20 aa, Artificial Sequence
  Synthetically generated peptide
  VARIANT (1)...(20): Xaa = Any Amino Acid
PGXTCGEICAXYAXACTGCX

SEQ ID NO: 1491 - protein, 19 aa, Artificial Sequence
  Synthetically generated peptide
  VARIANT (1)...(19): Xaa = Any Amino Acid
PGXTCGEICAXYAAXCTGC

SEQ ID NO: 1492 - protein, 20 aa, Artificial Sequence
  Synthetically generated peptide
  VARIANT (1)...(20): Xaa = Any Amino Acid
PGXTCGEICAXYAAXXCTGC

SEQ ID NO: 1493 - protein, 20 aa, Artificial Sequence
  Synthetically generated peptide
  VARIANT (1)...(20): Xaa = Any Amino Acid
PGXTCGEICAXYAAXCXTGC

SEQ ID NO: 1494 - protein, 20 aa, Artificial Sequence
  Synthetically generated peptide
  VARIANT (1)...(20): Xaa = Any Amino Acid
PGXTCGEICAXYAAXCTXGC

SEQ ID NO: 1495 - protein, 20 aa, Artificial Sequence
  Synthetically generated peptide
  VARIANT (1)...(20): Xaa = Any Amino Acid
PGXTCGEICAXYAAXCTGXC

SEQ ID NO: 1496 - protein, 20 aa, Artificial Sequence
  Synthetically generated peptide
  VARIANT (1)...(20): Xaa = Any Amino Acid
PGXTCGEICAXYAAXCTGCX

SEQ ID NO: 1497 - protein, 19 aa, Artificial Sequence
  Synthetically generated peptide
  VARIANT (1)...(19): Xaa = Any Amino Acid
PGXTCGEICAXYAACXTGC

SEQ ID NO: 1498 - protein, 20 aa, Artificial Sequence
  Synthetically generated peptide
  VARIANT (1)...(20): Xaa = Any Amino Acid
PGXTCGEICAXYAACXXTGC

SEQ ID NO: 1499 - protein, 20 aa, Artificial Sequence
  Synthetically generated peptide
  VARIANT (1)...(20): Xaa = Any Amino Acid
PGXTCGEICAXYAACXTXGC

SEQ ID NO: 1500 - protein, 20 aa, Artificial Sequence
  Synthetically generated peptide
  VARIANT (1)...(20): Xaa = Any Amino Acid
PGXTCGEICAXYAACXTGXC

SEQ ID NO: 1501 - protein, 20 aa, Artificial Sequence
  Synthetically generated peptide
  VARIANT (1)...(20): Xaa = Any Amino Acid
PGXTCGEICAXYAACXTGCX

SEQ ID NO: 1502 - protein, 19 aa, Artificial Sequence
  Synthetically generated peptide
  VARIANT (1)...(19): Xaa = Any Amino Acid
PGXTCGEICAXYAACTXGC

SEQ ID NO: 1503 - protein, 20 aa, Artificial Sequence
  Synthetically generated peptide
  VARIANT (1)...(20): Xaa = Any Amino Acid
PGXTCGEICAXYAACTXXGC

SEQ ID NO: 1504 - protein, 20 aa, Artificial Sequence
  Synthetically generated peptide
  VARIANT (1)...(20): Xaa = Any Amino Acid
PGXTCGEICAXYAACTXGXC

SEQ ID NO: 1505 - protein, 20 aa, Artificial Sequence
  Synthetically generated peptide
  VARIANT (1)...(20): Xaa = Any Amino Acid
PGXTCGEICAXYAACTXGCX

SEQ ID NO: 1506 - protein, 19 aa, Artificial Sequence
  Synthetically generated peptide
  VARIANT (1)...(19): Xaa = Any Amino Acid
PGXTCGEICAXYAACTGXC

SEQ ID NO: 1507 - protein, 20 aa, Artificial Sequence
  Synthetically generated peptide
  VARIANT (1)...(20): Xaa = Any Amino Acid
PGXTCGEICAXYAACTGXXC

SEQ ID NO: 1508 - protein, 20 aa, Artificial Sequence
  Synthetically generated peptide
  VARIANT (1)...(20): Xaa = Any Amino Acid
PGXTCGEICAXYAACTGXCX

SEQ ID NO: 1509 - protein, 19 aa, Artificial Sequence
  Synthetically generated peptide
  VARIANT (1)...(19): Xaa = Any Amino Acid
PGXTCGEICAXYAACTGCX

SEQ ID NO: 1510 - protein, 20 aa, Artificial Sequence
  Synthetically generated peptide
  VARIANT (1)...(20): Xaa = Any Amino Acid
PGXTCGEICAXYAACTGCXX

SEQ ID NO: 1511 - protein, 18 aa, Artificial Sequence
  Synthetically generated peptide
  VARIANT (1)...(18): Xaa = Any Amino Acid
PGXTCGEICAYXAACTGC

SEQ ID NO: 1512 - protein, 19 aa, Artificial Sequence
  Synthetically generated peptide
  VARIANT (1)...(19): Xaa = Any Amino Acid
PGXTCGEICAYXXAACTGC

SEQ ID NO: 1513 - protein, 20 aa, Artificial Sequence
  Synthetically generated peptide
  VARIANT (1)...(20): Xaa = Any Amino Acid
PGXTCGEICAYXXXAACTGC

SEQ ID NO: 1514 - protein, 20 aa, Artificial Sequence
  Synthetically generated peptide
  VARIANT (1)...(20): Xaa = Any Amino Acid
PGXTCGEICAYXXAXACTGC

SEQ ID NO: 1515 - protein, 20 aa, Artificial Sequence
  Synthetically generated peptide
  VARIANT (1)...(20): Xaa = Any Amino Acid
PGXTCGEICAYXXAAXCTGC

SEQ ID NO: 1516 - protein, 20 aa, Artificial Sequence
  Synthetically generated peptide
  VARIANT (1)...(20): Xaa = Any Amino Acid
PGXTCGEICAYXXAACXTGC

SEQ ID NO: 1517 - protein, 20 aa, Artificial Sequence
  Synthetically generated peptide
  VARIANT (1)...(20): Xaa = Any Amino Acid
PGXTCGEICAYXXAACTXGC

SEQ ID NO: 1518 - protein, 20 aa, Artificial Sequence
  Synthetically generated peptide
  VARIANT (1)...(20): Xaa = Any Amino Acid
PGXTCGEICAYXXAACTGXC

SEQ ID NO: 1519 - protein, 20 aa, Artificial Sequence
  Synthetically generated peptide
  VARIANT (1)...(20): Xaa = Any Amino Acid
PGXTCGEICAYXXAACTGCX

SEQ ID NO: 1520 - protein, 19 aa, Artificial Sequence
  Synthetically generated peptide
  VARIANT (1)...(19): Xaa = Any Amino Acid
PGXTCGEICAYXAXACTGC

SEQ ID NO: 1521 - protein, 20 aa, Artificial Sequence
  Synthetically generated peptide
  VARIANT (1)...(20): Xaa = Any Amino Acid
PGXTCGEICAYXAXXACTGC

SEQ ID NO: 1522 - protein, 20 aa, Artificial Sequence
  Synthetically generated peptide
  VARIANT (1)...(20): Xaa = Any Amino Acid
PGXTCGEICAYXAXAXCTGC

SEQ ID NO: 1523 - protein, 20 aa, Artificial Sequence
  Synthetically generated peptide
  VARIANT (1)...(20): Xaa = Any Amino Acid
PGXTCGEICAYXAXACXTGC

SEQ ID NO: 1524 - protein, 20 aa, Artificial Sequence
  Synthetically generated peptide
  VARIANT (1)...(20): Xaa = Any Amino Acid
PGXTCGEICAYXAXACTXGC

SEQ ID NO: 1525 - protein, 20 aa, Artificial Sequence
  Synthetically generated peptide
  VARIANT (1)...(20): Xaa = Any Amino Acid
PGXTCGEICAYXAXACTGXC

SEQ ID NO: 1526 - protein, 20 aa, Artificial Sequence
  Synthetically generated peptide
  VARIANT (1)...(20): Xaa = Any Amino Acid
PGXTCGEICAYXAXACTGCX

SEQ ID NO: 1527 - protein, 19 aa, Artificial Sequence
  Synthetically generated peptide
  VARIANT (1)...(19): Xaa = Any Amino Acid
PGXTCGEICAYXAAXCTGC

SEQ ID NO: 1528 - protein, 20 aa, Artificial Sequence
  Synthetically generated peptide
  VARIANT (1)...(20): Xaa = Any Amino Acid
PGXTCGEICAYXAAXXCTGC

SEQ ID NO: 1529 - protein, 20 aa, Artificial Sequence
  Synthetically generated peptide
  VARIANT (1)...(20): Xaa = Any Amino Acid
PGXTCGEICAYXAAXCXTGC

SEQ ID NO: 1530 - protein, 20 aa, Artificial Sequence
  Synthetically generated peptide
  VARIANT (1)...(20): Xaa = Any Amino Acid
PGXTCGEICAYXAAXCTXGC

SEQ ID NO: 1531 - protein, 20 aa, Artificial Sequence
  Synthetically generated peptide
  VARIANT (1)...(20): Xaa = Any Amino Acid
PGXTCGEICAYXAAXCTGXC

SEQ ID NO: 1532 - protein, 20 aa, Artificial Sequence
  Synthetically generated peptide
  VARIANT (1)...(20): Xaa = Any Amino Acid
PGXTCGEICAYXAAXCTGCX

SEQ ID NO: 1533 - protein, 19 aa, Artificial Sequence
  Synthetically generated peptide
  VARIANT (1)...(19): Xaa = Any Amino Acid
PGXTCGEICAYXAACXTGC

SEQ ID NO: 1534 - protein, 20 aa, Artificial Sequence
  Synthetically generated peptide
  VARIANT (1)...(20): Xaa = Any Amino Acid
PGXTCGEICAYXAACXXTGC

SEQ ID NO: 1535 - protein, 20 aa, Artificial Sequence
  Synthetically generated peptide
  VARIANT (1)...(20): Xaa = Any Amino Acid
PGXTCGEICAYXAACXTXGC

SEQ ID NO: 1536 - protein, 20 aa, Artificial Sequence
  Synthetically generated peptide
  VARIANT (1)...(20): Xaa = Any Amino Acid
PGXTCGEICAYXAACXTGXC

SEQ ID NO: 1537 - protein, 20 aa, Artificial Sequence
  Synthetically generated peptide
  VARIANT (1)...(20): Xaa = Any Amino Acid
PGXTCGEICAYXAACXTGCX

SEQ ID NO: 1538 - protein, 19 aa, Artificial Sequence
  Synthetically generated peptide
  VARIANT (1)...(19): Xaa = Any Amino Acid
PGXTCGEICAYXAACTXGC

SEQ ID NO: 1539 - protein, 20 aa, Artificial Sequence
  Synthetically generated peptide
  VARIANT (1)...(20): Xaa = Any Amino Acid
PGXTCGEICAYXAACTXXGC

SEQ ID NO: 1540 - protein, 20 aa, Artificial Sequence
  Synthetically generated peptide
  VARIANT (1)...(20): Xaa = Any Amino Acid
PGXTCGEICAYXAACTXGXC

SEQ ID NO: 1541 - protein, 20 aa, Artificial Sequence
  Synthetically generated peptide
  VARIANT (1)...(20): Xaa = Any Amino Acid
PGXTCGEICAYXAACTXGCX

SEQ ID NO: 1542 - protein, 19 aa, Artificial Sequence
  Synthetically generated peptide
  VARIANT (1)...(19): Xaa = Any Amino Acid
PGXTCGEICAYXAACTGXC

SEQ ID NO: 1543 - protein, 20 aa, Artificial Sequence
  Synthetically generated peptide
  VARIANT (1)...(20): Xaa = Any Amino Acid
PGXTCGEICAYXAACTGXXC

SEQ ID NO: 1544 - protein, 20 aa, Artificial Sequence
  Synthetically generated peptide
  VARIANT (1)...(20): Xaa = Any Amino Acid
PGXTCGEICAYXAACTGXCX

SEQ ID NO: 1545 - protein, 19 aa, Artificial Sequence
  Synthetically generated peptide
  VARIANT (1)...(19): Xaa = Any Amino Acid
PGXTCGEICAYXAACTGCX

SEQ ID NO: 1546 - protein, 20 aa, Artificial Sequence
  Synthetically generated peptide
  VARIANT (1)...(20): Xaa = Any Amino Acid
PGXTCGEICAYXAACTGCXX

SEQ ID NO: 1547 - protein, 18 aa, Artificial Sequence
  Synthetically generated peptide
  VARIANT (1)...(18): Xaa = Any Amino Acid
PGXTCGEICAYAXACTGC

SEQ ID NO: 1548 - protein, 19 aa, Artificial Sequence
  Synthetically generated peptide
  VARIANT (1)...(19): Xaa = Any Amino Acid
PGXTCGEICAYAXXACTGC

SEQ ID NO: 1549 - protein, 20 aa, Artificial Sequence
  Synthetically generated peptide
  VARIANT (1)...(20): Xaa = Any Amino Acid
PGXTCGEICAYAXXXACTGC

SEQ ID NO: 1550 - protein, 20 aa, Artificial Sequence
  Synthetically generated peptide
  VARIANT (1)...(20): Xaa = Any Amino Acid
PGXTCGEICAYAXXAXCTGC

SEQ ID NO: 1551 - protein, 20 aa, Artificial Sequence
  Synthetically generated peptide
  VARIANT (1)...(20): Xaa = Any Amino Acid
PGXTCGEICAYAXXACXTGC

SEQ ID NO: 1552 - protein, 20 aa, Artificial Sequence
  Synthetically generated peptide
  VARIANT (1)...(20): Xaa = Any Amino Acid
PGXTCGEICAYAXXACTXGC

SEQ ID NO: 1553 - protein, 20 aa, Artificial Sequence
  Synthetically generated peptide
  VARIANT (1)...(20): Xaa = Any Amino Acid
PGXTCGEICAYAXXACTGXC

SEQ ID NO: 1554 - protein, 20 aa, Artificial Sequence
  Synthetically generated peptide
  VARIANT (1)...(20): Xaa = Any Amino Acid
PGXTCGEICAYAXXACTGCX

SEQ ID NO: 1555 - protein, 19 aa, Artificial Sequence
  Synthetically generated peptide
  VARIANT (1)...(19): Xaa = Any Amino Acid
PGXTCGEICAYAXAXCTGC

SEQ ID NO: 1556 - protein, 20 aa, Artificial Sequence
  Synthetically generated peptide
  VARIANT (1)...(20): Xaa = Any Amino Acid
PGXTCGEICAYAXAXXCTGC

SEQ ID NO: 1557 - protein, 20 aa, Artificial Sequence
  Synthetically generated peptide
  VARIANT (1)...(20): Xaa = Any Amino Acid
PGXTCGEICAYAXAXCXTGC

SEQ ID NO: 1558 - protein, 20 aa, Artificial Sequence
  Synthetically generated peptide
  VARIANT (1)...(20): Xaa = Any Amino Acid
PGXTCGEICAYAXAXCTXGC

SEQ ID NO: 1559 - protein, 20 aa, Artificial Sequence
  Synthetically generated peptide
  VARIANT (1)...(20): Xaa = Any Amino Acid
PGXTCGEICAYAXAXCTGXC

SEQ ID NO: 1560 - protein, 20 aa, Artificial Sequence
  Synthetically generated peptide
  VARIANT (1)...(20): Xaa = Any Amino Acid
PGXTCGEICAYAXAXCTGCX

SEQ ID NO: 1561 - protein, 19 aa, Artificial Sequence
  Synthetically generated peptide
  VARIANT (1)...(19): Xaa = Any Amino Acid
PGXTCGEICAYAXACXTGC

SEQ ID NO: 1562 - protein, 20 aa, Artificial Sequence
  Synthetically generated peptide
  VARIANT (1)...(20): Xaa = Any Amino Acid
PGXTCGEICAYAXACXXTGC

SEQ ID NO: 1563 - protein, 20 aa, Artificial Sequence
  Synthetically generated peptide
  VARIANT (1)...(20): Xaa = Any Amino Acid
PGXTCGEICAYAXACXTXGC

SEQ ID NO: 1564 - protein, 20 aa, Artificial Sequence
  Synthetically generated peptide
  VARIANT (1)...(20): Xaa = Any Amino Acid
PGXTCGEICAYAXACXTGXC

SEQ ID NO: 1565 - protein, 20 aa, Artificial Sequence
  Synthetically generated peptide
  VARIANT (1)...(20): Xaa = Any Amino Acid
PGXTCGEICAYAXACXTGCX

SEQ ID NO: 1566 - protein, 19 aa, Artificial Sequence
  Synthetically generated peptide
  VARIANT (1)...(19): Xaa = Any Amino Acid
PGXTCGEICAYAXACTXGC

SEQ ID NO: 1567 - protein, 20 aa, Artificial Sequence
  Synthetically generated peptide
  VARIANT (1)...(20): Xaa = Any Amino Acid
PGXTCGEICAYAXACTXXGC

SEQ ID NO: 1568 - protein, 20 aa, Artificial Sequence
  Synthetically generated peptide
  VARIANT (1)...(20): Xaa = Any Amino Acid
PGXTCGEICAYAXACTXGXC

SEQ ID NO: 1569 - protein, 20 aa, Artificial Sequence
  Synthetically generated peptide
  VARIANT (1)...(20): Xaa = Any Amino Acid
PGXTCGEICAYAXACTXGCX

SEQ ID NO: 1570 - protein, 19 aa, Artificial Sequence
  Synthetically generated peptide
  VARIANT (1)...(19): Xaa = Any Amino Acid
PGXTCGEICAYAXACTGXC

SEQ ID NO: 1571 - protein, 20 aa, Artificial Sequence
  Synthetically generated peptide
  VARIANT (1)...(20): Xaa = Any Amino Acid
PGXTCGEICAYAXACTGXXC

SEQ ID NO: 1572 - protein, 20 aa, Artificial Sequence
  Synthetically generated peptide
  VARIANT (1)...(20): Xaa = Any Amino Acid
PGXTCGEICAYAXACTGXCX

SEQ ID NO: 1573 - protein, 19 aa, Artificial Sequence
  Synthetically generated peptide
  VARIANT (1)...(19): Xaa = Any Amino Acid
PGXTCGEICAYAXACTGCX

SEQ ID NO: 1574 - protein, 20 aa, Artificial Sequence
  Synthetically generated peptide
  VARIANT (1)...(20): Xaa = Any Amino Acid
PGXTCGEICAYAXACTGCXX

SEQ ID NO: 1575 - protein, 18 aa, Artificial Sequence
  Synthetically generated peptide
  VARIANT (1)...(18): Xaa = Any Amino Acid
PGXTCGEICAYAAXCTGC

SEQ ID NO: 1576 - protein, 19 aa, Artificial Sequence
  Synthetically generated peptide
  VARIANT (1)...(19): Xaa = Any Amino Acid
PGXTCGEICAYAAXXCTGC

SEQ ID NO: 1577 - protein, 20 aa, Artificial Sequence
  Synthetically generated peptide
  VARIANT (1)...(20): Xaa = Any Amino Acid
PGXTCGEICAYAAXXXCTGC

SEQ ID NO: 1578 - protein, 20 aa, Artificial Sequence
  Synthetically generated peptide
  VARIANT (1)...(20): Xaa = Any Amino Acid
PGXTCGEICAYAAXXCXTGC

SEQ ID NO: 1579 - protein, 20 aa, Artificial Sequence
  Synthetically generated peptide
  VARIANT (1)...(20): Xaa = Any Amino Acid
PGXTCGEICAYAAXXCTXGC

SEQ ID NO: 1580 - protein, 20 aa, Artificial Sequence
  Synthetically generated peptide
  VARIANT (1)...(20): Xaa = Any Amino Acid
PGXTCGEICAYAAXXCTGXC

SEQ ID NO: 1581 - protein, 20 aa, Artificial Sequence
  Synthetically generated peptide
  VARIANT (1)...(20): Xaa = Any Amino Acid
PGXTCGEICAYAAXXCTGCX

SEQ ID NO: 1582 - protein, 19 aa, Artificial Sequence
  Synthetically generated peptide
  VARIANT (1)...(19): Xaa = Any Amino Acid
PGXTCGEICAYAAXCXTGC

SEQ ID NO: 1583 - protein, 20 aa, Artificial Sequence
  Synthetically generated peptide
  VARIANT (1)...(20): Xaa = Any Amino Acid
PGXTCGEICAYAAXCXXTGC

SEQ ID NO: 1584 - protein, 20 aa, Artificial Sequence
  Synthetically generated peptide
  VARIANT (1)...(20): Xaa = Any Amino Acid
PGXTCGEICAYAAXCXTXGC

SEQ ID NO: 1585 - protein, 20 aa, Artificial Sequence
  Synthetically generated peptide
  VARIANT (1)...(20): Xaa = Any Amino Acid
PGXTCGEICAYAAXCXTGXC

SEQ ID NO: 1586 - protein, 20 aa, Artificial Sequence
  Synthetically generated peptide
  VARIANT (1)...(20): Xaa = Any Amino Acid
PGXTCGEICAYAAXCXTGCX

SEQ ID NO: 1587 - protein, 19 aa, Artificial Sequence
  Synthetically generated peptide
  VARIANT (1)...(19): Xaa = Any Amino Acid
PGXTCGEICAYAAXCTXGC

SEQ ID NO: 1588 - protein, 20 aa, Artificial Sequence
  Synthetically generated peptide
  VARIANT (1)...(20): Xaa = Any Amino Acid
PGXTCGEICAYAAXCTXXGC

SEQ ID NO: 1589 - protein, 20 aa, Artificial Sequence
  Synthetically generated peptide
  VARIANT (1)...(20): Xaa = Any Amino Acid
PGXTCGEICAYAAXCTXGXC

SEQ ID NO: 1590 - protein, 20 aa, Artificial Sequence
  Synthetically generated peptide
  VARIANT (1)...(20): Xaa = Any Amino Acid
PGXTCGEICAYAAXCTXGCX

SEQ ID NO: 1591 - protein, 19 aa, Artificial Sequence
  Synthetically generated peptide
  VARIANT (1)...(19): Xaa = Any Amino Acid
PGXTCGEICAYAAXCTGXC

SEQ ID NO: 1592 - protein, 20 aa, Artificial Sequence
  Synthetically generated peptide
  VARIANT (1)...(20): Xaa = Any Amino Acid
PGXTCGEICAYAAXCTGXXC

SEQ ID NO: 1593 - protein, 20 aa, Artificial Sequence
  Synthetically generated peptide
  VARIANT (1)...(20): Xaa = Any Amino Acid
PGXTCGEICAYAAXCTGXCX

SEQ ID NO: 1594 - protein, 19 aa, Artificial Sequence
  Synthetically generated peptide
  VARIANT (1)...(19): Xaa = Any Amino Acid
PGXTCGEICAYAAXCTGCX

SEQ ID NO: 1595 - protein, 20 aa, Artificial Sequence
  Synthetically generated peptide
  VARIANT (1)...(20): Xaa = Any Amino Acid
PGXTCGEICAYAAXCTGCXX

SEQ ID NO: 1596 - protein, 18 aa, Artificial Sequence
  Synthetically generated peptide
  VARIANT (1)...(18): Xaa = Any Amino Acid
PGXTCGEICAYAACXTGC

SEQ ID NO: 1597 - protein, 19 aa, Artificial Sequence
  Synthetically generated peptide
  VARIANT (1)...(19): Xaa = Any Amino Acid
PGXTCGEICAYAACXXTGC

SEQ ID NO: 1598 - protein, 20 aa, Artificial Sequence
  Synthetically generated peptide
  VARIANT (1)...(20): Xaa = Any Amino Acid
PGXTCGEICAYAACXXXTGC

SEQ ID NO: 1599 - protein, 20 aa, Artificial Sequence
  Synthetically generated peptide
  VARIANT (1)...(20): Xaa = Any Amino Acid
PGXTCGEICAYAACXXTXGC

SEQ ID NO: 1600 - protein, 20 aa, Artificial Sequence
  Synthetically generated peptide
  VARIANT (1)...(20): Xaa = Any Amino Acid
PGXTCGEICAYAACXXTGXC

SEQ ID NO: 1601 - protein, 20 aa, Artificial Sequence
  Synthetically generated peptide
  VARIANT (1)...(20): Xaa = Any Amino Acid
PGXTCGEICAYAACXXTGCX

SEQ ID NO: 1602 - protein, 19 aa, Artificial Sequence
  Synthetically generated peptide
  VARIANT (1)...(19): Xaa = Any Amino Acid
PGXTCGEICAYAACXTXGC

SEQ ID NO: 1603 - protein, 20 aa, Artificial Sequence
  Synthetically generated peptide
  VARIANT (1)...(20): Xaa = Any Amino Acid
PGXTCGEICAYAACXTXXGC

SEQ ID NO: 1604 - protein, 20 aa, Artificial Sequence
  Synthetically generated peptide
  VARIANT (1)...(20): Xaa = Any Amino Acid
PGXTCGEICAYAACXTXGXC

SEQ ID NO: 1605 - protein, 20 aa, Artificial Sequence
  Synthetically generated peptide
  VARIANT (1)...(20): Xaa = Any Amino Acid
PGXTCGEICAYAACXTXGCX

SEQ ID NO: 1606 - protein, 19 aa, Artificial Sequence
  Synthetically generated peptide
  VARIANT (1)...(19): Xaa = Any Amino Acid
PGXTCGEICAYAACXTGXC

SEQ ID NO: 1607 - protein, 20 aa, Artificial Sequence
  Synthetically generated peptide
  VARIANT (1)...(20): Xaa = Any Amino Acid
PGXTCGEICAYAACXTGXXC

SEQ ID NO: 1608 - protein, 20 aa, Artificial Sequence
  Synthetically generated peptide
  VARIANT (1)...(20): Xaa = Any Amino Acid
PGXTCGEICAYAACXTGXCX

SEQ ID NO: 1609 - protein, 19 aa, Artificial Sequence
  Synthetically generated peptide
  VARIANT (1)...(19): Xaa = Any Amino Acid
PGXTCGEICAYAACXTGCX

SEQ ID NO: 1610 - protein, 20 aa, Artificial Sequence
  Synthetically generated peptide
  VARIANT (1)...(20): Xaa = Any Amino Acid
PGXTCGEICAYAACXTGCXX

SEQ ID NO: 1611 - protein, 18 aa, Artificial Sequence
  Synthetically generated peptide
  VARIANT (1)...(18): Xaa = Any Amino Acid
PGXTCGEICAYAACTXGC

SEQ ID NO: 1612 - protein, 19 aa, Artificial Sequence
  Synthetically generated peptide
  VARIANT (1)...(19): Xaa = Any Amino Acid
PGXTCGEICAYAACTXXGC

SEQ ID NO: 1613 - protein, 20 aa, Artificial Sequence
  Synthetically generated peptide
  VARIANT (1)...(20): Xaa = Any Amino Acid
PGXTCGEICAYAACTXXXGC

SEQ ID NO: 1614 - protein, 20 aa, Artificial Sequence
  Synthetically generated peptide
  VARIANT (1)...(20): Xaa = Any Amino Acid
PGXTCGEICAYAACTXXGXC

SEQ ID NO: 1615 - protein, 20 aa, Artificial Sequence
  Synthetically generated peptide
  VARIANT (1)...(20): Xaa = Any Amino Acid
PGXTCGEICAYAACTXXGCX

SEQ ID NO: 1616 - protein, 19 aa, Artificial Sequence
  Synthetically generated peptide
  VARIANT (1)...(19): Xaa = Any Amino Acid
PGXTCGEICAYAACTXGXC

SEQ ID NO: 1617 - protein, 20 aa, Artificial Sequence
  Synthetically generated peptide
  VARIANT (1)...(20): Xaa = Any Amino Acid
PGXTCGEICAYAACTXGXXC

SEQ ID NO: 1618 - protein, 20 aa, Artificial Sequence
  Synthetically generated peptide
  VARIANT (1)...(20): Xaa = Any Amino Acid
PGXTCGEICAYAACTXGXCX

SEQ ID NO: 1619 - protein, 19 aa, Artificial Sequence
  Synthetically generated peptide
  VARIANT (1)...(19): Xaa = Any Amino Acid
PGXTCGEICAYAACTXGCX

SEQ ID NO: 1620 - protein, 20 aa, Artificial Sequence
  Synthetically generated peptide
  VARIANT (1)...(20): Xaa = Any Amino Acid
PGXTCGEICAYAACTXGCXX

SEQ ID NO: 1621 - protein, 18 aa, Artificial Sequence
  Synthetically generated peptide
  VARIANT (1)...(18): Xaa = Any Amino Acid
PGXTCGEICAYAACTGXC

SEQ ID NO: 1622 - protein, 19 aa, Artificial Sequence
  Synthetically generated peptide
  VARIANT (1)...(19): Xaa = Any Amino Acid
PGXTCGEICAYAACTGXXC

SEQ ID NO: 1623 - protein, 20 aa, Artificial Sequence
  Synthetically generated peptide
  VARIANT (1)...(20): Xaa = Any Amino Acid
PGXTCGEICAYAACTGXXXC

SEQ ID NO: 1624 - protein, 20 aa, Artificial Sequence
  Synthetically generated peptide
  VARIANT (1)...(20): Xaa = Any Amino Acid
PGXTCGEICAYAACTGXXCX

SEQ ID NO: 1625 - protein, 19 aa, Artificial Sequence
  Synthetically generated peptide
  VARIANT (1)...(19): Xaa = Any Amino Acid
PGXTCGEICAYAACTGXCX

SEQ ID NO: 1626 - protein, 20 aa, Artificial Sequence
  Synthetically generated peptide
  VARIANT (1)...(20): Xaa = Any Amino Acid
PGXTCGEICAYAACTGXCXX

SEQ ID NO: 1627 - protein, 18 aa, Artificial Sequence
  Synthetically generated peptide
  VARIANT (1)...(18): Xaa = Any Amino Acid
PGXTCGEICAYAACTGCX

SEQ ID NO: 1628 - protein, 19 aa, Artificial Sequence
  Synthetically generated peptide
  VARIANT (1)...(19): Xaa = Any Amino Acid
PGXTCGEICAYAACTGCXX

SEQ ID NO: 1629 - protein, 20 aa, Artificial Sequence
  Synthetically generated peptide
  VARIANT (1)...(20): Xaa = Any Amino Acid
PGXTCGEICAYAACTGCXXX

SEQ ID NO: 1630 - protein, 17 aa, Artificial Sequence
  Synthetically generated peptide
  VARIANT (1)...(17): Xaa = Any Amino Acid
PGTXCGEICAYAACTGC

SEQ ID NO: 1631 - protein, 18 aa, Artificial Sequence
  Synthetically generated peptide
  VARIANT (1)...(18): Xaa = Any Amino Acid
PGTXXCGEICAYAACTGC

SEQ ID NO: 1632 - protein, 19 aa, Artificial Sequence
  Synthetically generated peptide
  VARIANT (1)...(19): Xaa = Any Amino Acid
PGTXXXCGEICAYAACTGC

SEQ ID NO: 1633 - protein, 20 aa, Artificial Sequence
  Synthetically generated peptide
  VARIANT (1)...(20): Xaa = Any Amino Acid
PGTXXXXCGEICAYAACTGC

SEQ ID NO: 1634 - protein, 20 aa, Artificial Sequence
  Synthetically generated peptide
  VARIANT (1)...(20): Xaa = Any Amino Acid
PGTXXXCXGEICAYAACTGC

SEQ ID NO: 1635 - protein, 20 aa, Artificial Sequence
  Synthetically generated peptide
  VARIANT (1)...(20): Xaa = Any Amino Acid
PGTXXXCGXEICAYAACTGC

SEQ ID NO: 1636 - protein, 20 aa, Artificial Sequence
  Synthetically generated peptide
  VARIANT (1)...(20): Xaa = Any Amino Acid
PGTXXXCGEXICAYAACTGC

SEQ ID NO: 1637 - protein, 20 aa, Artificial Sequence
  Synthetically generated peptide
  VARIANT (1)...(20): Xaa = Any Amino Acid
PGTXXXCGEIXCAYAACTGC

SEQ ID NO: 1638 - protein, 20 aa, Artificial Sequence
  Synthetically generated peptide
  VARIANT (1)...(20): Xaa = Any Amino Acid
PGTXXXCGEICXAYAACTGC

SEQ ID NO: 1639 - protein, 20 aa, Artificial Sequence
  Synthetically generated peptide
  VARIANT (1)...(20): Xaa = Any Amino Acid
PGTXXXCGEICAXYAACTGC

SEQ ID NO: 1640 - protein, 20 aa, Artificial Sequence
  Synthetically generated peptide
  VARIANT (1)...(20): Xaa = Any Amino Acid
PGTXXXCGEICAYXAACTGC

SEQ ID NO: 1641 - protein, 20 aa, Artificial Sequence
  Synthetically generated peptide
  VARIANT (1)...(20): Xaa = Any Amino Acid
PGTXXXCGEICAYAXACTGC

SEQ ID NO: 1642 - protein, 20 aa, Artificial Sequence
  Synthetically generated peptide
  VARIANT (1)...(20): Xaa = Any Amino Acid
PGTXXXCGEICAYAAXCTGC

SEQ ID NO: 1643 - protein, 20 aa, Artificial Sequence
  Synthetically generated peptide
  VARIANT (1)...(20): Xaa = Any Amino Acid
PGTXXXCGEICAYAACXTGC

SEQ ID NO: 1644 - protein, 20 aa, Artificial Sequence
  Synthetically generated peptide
  VARIANT (1)...(20): Xaa = Any Amino Acid
PGTXXXCGEICAYAACTXGC

SEQ ID NO: 1645 - protein, 20 aa, Artificial Sequence
  Synthetically generated peptide
  VARIANT (1)...(20): Xaa = Any Amino Acid
PGTXXXCGEICAYAACTGXC

SEQ ID NO: 1646 - protein, 20 aa, Artificial Sequence
  Synthetically generated peptide
  VARIANT (1)...(20): Xaa = Any Amino Acid
PGTXXXCGEICAYAACTGCX

SEQ ID NO: 1647 - protein, 19 aa, Artificial Sequence
  Synthetically generated peptide
  VARIANT (1)...(19): Xaa = Any Amino Acid
PGTXXCXGEICAYAACTGC

SEQ ID NO: 1648 - protein, 20 aa, Artificial Sequence
  Synthetically generated peptide
  VARIANT (1)...(20): Xaa = Any Amino Acid
PGTXXCXXGEICAYAACTGC

SEQ ID NO: 1649 - protein, 20 aa, Artificial Sequence
  Synthetically generated peptide
  VARIANT (1)...(20): Xaa = Any Amino Acid
PGTXXCXGXEICAYAACTGC

SEQ ID NO: 1650 - protein, 20 aa, Artificial Sequence
  Synthetically generated peptide
  VARIANT (1)...(20): Xaa = Any Amino Acid
PGTXXCXGEXICAYAACTGC

SEQ ID NO: 1651 - protein, 20 aa, Artificial Sequence
  Synthetically generated peptide
  VARIANT (1)...(20): Xaa = Any Amino Acid
PGTXXCXGEIXCAYAACTGC

SEQ ID NO: 1652 - protein, 20 aa, Artificial Sequence
  Synthetically generated peptide
  VARIANT (1)...(20): Xaa = Any Amino Acid
PGTXXCXGEICXAYAACTGC

SEQ ID NO: 1653 - protein, 20 aa, Artificial Sequence
  Synthetically generated peptide
  VARIANT (1)...(20): Xaa = Any Amino Acid
PGTXXCXGEICAXYAACTGC

SEQ ID NO: 1654 - protein, 20 aa, Artificial Sequence
  Synthetically generated peptide
  VARIANT (1)...(20): Xaa = Any Amino Acid
PGTXXCXGEICAYXAACTGC

SEQ ID NO: 1655 - protein, 20 aa, Artificial Sequence
  Synthetically generated peptide
  VARIANT (1)...(20): Xaa = Any Amino Acid
PGTXXCXGEICAYAXACTGC

SEQ ID NO: 1656 - protein, 20 aa, Artificial Sequence
  Synthetically generated peptide
  VARIANT (1)...(20): Xaa = Any Amino Acid
PGTXXCXGEICAYAAXCTGC

SEQ ID NO: 1657 - protein, 20 aa, Artificial Sequence
  Synthetically generated peptide
  VARIANT (1)...(20): Xaa = Any Amino Acid
PGTXXCXGEICAYAACXTGC

SEQ ID NO: 1658 - protein, 20 aa, Artificial Sequence
  Synthetically generated peptide
  VARIANT (1)...(20): Xaa = Any Amino Acid
PGTXXCXGEICAYAACTXGC

SEQ ID NO: 1659 - protein, 20 aa, Artificial Sequence
  Synthetically generated peptide
  VARIANT (1)...(20): Xaa = Any Amino Acid
PGTXXCXGEICAYAACTGXC

SEQ ID NO: 1660 - protein, 20 aa, Artificial Sequence
  Synthetically generated peptide
  VARIANT (1)...(20): Xaa = Any Amino Acid
PGTXXCXGEICAYAACTGCX

SEQ ID NO: 1661 - protein, 19 aa, Artificial Sequence
  Synthetically generated peptide
  VARIANT (1)...(19): Xaa = Any Amino Acid
PGTXXCGXEICAYAACTGC

SEQ ID NO: 1662 - protein, 20 aa, Artificial Sequence
  Synthetically generated peptide
  VARIANT (1)...(20): Xaa = Any Amino Acid
PGTXXCGXXEICAYAACTGC

SEQ ID NO: 1663 - protein, 20 aa, Artificial Sequence
  Synthetically generated peptide
  VARIANT (1)...(20): Xaa = Any Amino Acid
PGTXXCGXEXICAYAACTGC

SEQ ID NO: 1664 - protein, 20 aa, Artificial Sequence
  Synthetically generated peptide
  VARIANT (1)...(20): Xaa = Any Amino Acid
PGTXXCGXEIXCAYAACTGC

SEQ ID NO: 1665 - protein, 20 aa, Artificial Sequence
  Synthetically generated peptide
  VARIANT (1)...(20): Xaa = Any Amino Acid
PGTXXCGXEICXAYAACTGC

SEQ ID NO: 1666 - protein, 20 aa, Artificial Sequence
  Synthetically generated peptide
  VARIANT (1)...(20): Xaa = Any Amino Acid
PGTXXCGXEICAXYAACTGC

SEQ ID NO: 1667 - protein, 20 aa, Artificial Sequence
  Synthetically generated peptide
  VARIANT (1)...(20): Xaa = Any Amino Acid
PGTXXCGXEICAYXAACTGC

SEQ ID NO: 1668 - protein, 20 aa, Artificial Sequence
  Synthetically generated peptide
  VARIANT (1)...(20): Xaa = Any Amino Acid
PGTXXCGXEICAYAXACTGC

SEQ ID NO: 1669 - protein, 20 aa, Artificial Sequence
  Synthetically generated peptide
  VARIANT (1)...(20): Xaa = Any Amino Acid
PGTXXCGXEICAYAAXCTGC

SEQ ID NO: 1670 - protein, 20 aa, Artificial Sequence
  Synthetically generated peptide
  VARIANT (1)...(20): Xaa = Any Amino Acid
PGTXXCGXEICAYAACXTGC

SEQ ID NO: 1671 - protein, 20 aa, Artificial Sequence
  Synthetically generated peptide
  VARIANT (1)...(20): Xaa = Any Amino Acid
PGTXXCGXEICAYAACTXGC

SEQ ID NO: 1672 - protein, 20 aa, Artificial Sequence
  Synthetically generated peptide
  VARIANT (1)...(20): Xaa = Any Amino Acid
PGTXXCGXEICAYAACTGXC

SEQ ID NO: 1673 - protein, 20 aa, Artificial Sequence
  Synthetically generated peptide
  VARIANT (1)...(20): Xaa = Any Amino Acid
PGTXXCGXEICAYAACTGCX

SEQ ID NO: 1674 - protein, 19 aa, Artificial Sequence
  Synthetically generated peptide
  VARIANT (1)...(19): Xaa = Any Amino Acid
PGTXXCGEXICAYAACTGC

SEQ ID NO: 1675 - protein, 20 aa, Artificial Sequence
  Synthetically generated peptide
  VARIANT (1)...(20): Xaa = Any Amino Acid
PGTXXCGEXXICAYAACTGC

SEQ ID NO: 1676 - protein, 20 aa, Artificial Sequence
  Synthetically generated peptide
  VARIANT (1)...(20): Xaa = Any Amino Acid
PGTXXCGEXIXCAYAACTGC

SEQ ID NO: 1677 - protein, 20 aa, Artificial Sequence
  Synthetically generated peptide
  VARIANT (1)...(20): Xaa = Any Amino Acid
PGTXXCGEXICXAYAACTGC

SEQ ID NO: 1678 - protein, 20 aa, Artificial Sequence
  Synthetically generated peptide
  VARIANT (1)...(20): Xaa = Any Amino Acid
PGTXXCGEXICAXYAACTGC

SEQ ID NO: 1679 - protein, 20 aa, Artificial Sequence
  Synthetically generated peptide
  VARIANT (1)...(20): Xaa = Any Amino Acid
PGTXXCGEXICAYXAACTGC

SEQ ID NO: 1680 - protein, 20 aa, Artificial Sequence
  Synthetically generated peptide
  VARIANT (1)...(20): Xaa = Any Amino Acid
PGTXXCGEXICAYAXACTGC

SEQ ID NO: 1681 - protein, 20 aa, Artificial Sequence
  Synthetically generated peptide
  VARIANT (1)...(20): Xaa = Any Amino Acid
PGTXXCGEXICAYAAXCTGC

SEQ ID NO: 1682 - protein, 20 aa, Artificial Sequence
  Synthetically generated peptide
  VARIANT (1)...(20): Xaa = Any Amino Acid
PGTXXCGEXICAYAACXTGC

SEQ ID NO: 1683 - protein, 20 aa, Artificial Sequence
  Synthetically generated peptide
  VARIANT (1)...(20): Xaa = Any Amino Acid
PGTXXCGEXICAYAACTXGC

SEQ ID NO: 1684 - protein, 20 aa, Artificial Sequence
  Synthetically generated peptide
  VARIANT (1)...(20): Xaa = Any Amino Acid
PGTXXCGEXICAYAACTGXC

SEQ ID NO: 1685 - protein, 20 aa, Artificial Sequence
  Synthetically generated peptide
  VARIANT (1)...(20): Xaa = Any Amino Acid
PGTXXCGEXICAYAACTGCX

SEQ ID NO: 1686 - protein, 19 aa, Artificial Sequence
  Synthetically generated peptide
  VARIANT (1)...(19): Xaa = Any Amino Acid
PGTXXCGEIXCAYAACTGC

SEQ ID NO: 1687 - protein, 20 aa, Artificial Sequence
  Synthetically generated peptide
  VARIANT (1)...(20): Xaa = Any Amino Acid
PGTXXCGEIXXCAYAACTGC

SEQ ID NO: 1688 - protein, 20 aa, Artificial Sequence
  Synthetically generated peptide
  VARIANT (1)...(20): Xaa = Any Amino Acid
PGTXXCGEIXCXAYAACTGC

SEQ ID NO: 1689 - protein, 20 aa, Artificial Sequence
  Synthetically generated peptide
  VARIANT (1)...(20): Xaa = Any Amino Acid
PGTXXCGEIXCAXYAACTGC

SEQ ID NO: 1690 - protein, 20 aa, Artificial Sequence
  Synthetically generated peptide
  VARIANT (1)...(20): Xaa = Any Amino Acid
PGTXXCGEIXCAYXAACTGC

SEQ ID NO: 1691 - protein, 20 aa, Artificial Sequence
  Synthetically generated peptide
  VARIANT (1)...(20): Xaa = Any Amino Acid
PGTXXCGEIXCAYAXACTGC

SEQ ID NO: 1692 - protein, 20 aa, Artificial Sequence
  Synthetically generated peptide
  VARIANT (1)...(20): Xaa = Any Amino Acid
PGTXXCGEIXCAYAAXCTGC

SEQ ID NO: 1693 - protein, 20 aa, Artificial Sequence
  Synthetically generated peptide
  VARIANT (1)...(20): Xaa = Any Amino Acid
PGTXXCGEIXCAYAACXTGC

SEQ ID NO: 1694 - protein, 20 aa, Artificial Sequence
  Synthetically generated peptide
  VARIANT (1)...(20): Xaa = Any Amino Acid
PGTXXCGEIXCAYAACTXGC

SEQ ID NO: 1695 - protein, 20 aa, Artificial Sequence
  Synthetically generated peptide
  VARIANT (1)...(20): Xaa = Any Amino Acid
PGTXXCGEIXCAYAACTGXC

SEQ ID NO: 1696 - protein, 20 aa, Artificial Sequence
  Synthetically generated peptide
  VARIANT (1)...(20): Xaa = Any Amino Acid
PGTXXCGEIXCAYAACTGCX

SEQ ID NO: 1697 - protein, 19 aa, Artificial Sequence
  Synthetically generated peptide
  VARIANT (1)...(19): Xaa = Any Amino Acid
PGTXXCGEICXAYAACTGC

SEQ ID NO: 1698 - protein, 20 aa, Artificial Sequence
  Synthetically generated peptide
  VARIANT (1)...(20): Xaa = Any Amino Acid
PGTXXCGEICXXAYAACTGC

SEQ ID NO: 1699 - protein, 20 aa, Artificial Sequence
  Synthetically generated peptide
  VARIANT (1)...(20): Xaa = Any Amino Acid
PGTXXCGEICXAXYAACTGC

SEQ ID NO: 1700 - protein, 20 aa, Artificial Sequence
  Synthetically generated peptide
  VARIANT (1)...(20): Xaa = Any Amino Acid
PGTXXCGEICXAYXAACTGC

SEQ ID NO: 1701 - protein, 20 aa, Artificial Sequence
  Synthetically generated peptide
  VARIANT (1)...(20): Xaa = Any Amino Acid
PGTXXCGEICXAYAXACTGC

SEQ ID NO: 1702 - protein, 20 aa, Artificial Sequence
  Synthetically generated peptide
  VARIANT (1)...(20): Xaa = Any Amino Acid
PGTXXCGEICXAYAAXCTGC

SEQ ID NO: 1703 - protein, 20 aa, Artificial Sequence
  Synthetically generated peptide
  VARIANT (1)...(20): Xaa = Any Amino Acid
PGTXXCGEICXAYAACXTGC

SEQ ID NO: 1704 - protein, 20 aa, Artificial Sequence
  Synthetically generated peptide
  VARIANT (1)...(20): Xaa = Any Amino Acid
PGTXXCGEICXAYAACTXGC

SEQ ID NO: 1705 - protein, 20 aa, Artificial Sequence
  Synthetically generated peptide
  VARIANT (1)...(20): Xaa = Any Amino Acid
PGTXXCGEICXAYAACTGXC

SEQ ID NO: 1706 - protein, 20 aa, Artificial Sequence
  Synthetically generated peptide
  VARIANT (1)...(20): Xaa = Any Amino Acid
PGTXXCGEICXAYAACTGCX

SEQ ID NO: 1707 - protein, 19 aa, Artificial Sequence
  Synthetically generated peptide
  VARIANT (1)...(19): Xaa = Any Amino Acid
PGTXXCGEICAXYAACTGC

SEQ ID NO: 1708 - protein, 20 aa, Artificial Sequence
  Synthetically generated peptide
  VARIANT (1)...(20): Xaa = Any Amino Acid
PGTXXCGEICAXXYAACTGC

SEQ ID NO: 1709 - protein, 20 aa, Artificial Sequence
  Synthetically generated peptide
  VARIANT (1)...(20): Xaa = Any Amino Acid
PGTXXCGEICAXYXAACTGC

SEQ ID NO: 1710 - protein, 20 aa, Artificial Sequence
  Synthetically generated peptide
  VARIANT (1)...(20): Xaa = Any Amino Acid
PGTXXCGEICAXYAXACTGC

SEQ ID NO: 1711 - protein, 20 aa, Artificial Sequence
  Synthetically generated peptide
  VARIANT (1)...(20): Xaa = Any Amino Acid
PGTXXCGEICAXYAAXCTGC

SEQ ID NO: 1712 - protein, 20 aa, Artificial Sequence
  Synthetically generated peptide
  VARIANT (1)...(20): Xaa = Any Amino Acid
PGTXXCGEICAXYAACXTGC

SEQ ID NO: 1713 - protein, 20 aa, Artificial Sequence
  Synthetically generated peptide
  VARIANT (1)...(20): Xaa = Any Amino Acid
PGTXXCGEICAXYAACTXGC

SEQ ID NO: 1714 - protein, 20 aa, Artificial Sequence
  Synthetically generated peptide
  VARIANT (1)...(20): Xaa = Any Amino Acid
PGTXXCGEICAXYAACTGXC

SEQ ID NO: 1715 - protein, 20 aa, Artificial Sequence
  Synthetically generated peptide
  VARIANT (1)...(20): Xaa = Any Amino Acid
PGTXXCGEICAXYAACTGCX

SEQ ID NO: 1716 - protein, 19 aa, Artificial Sequence
  Synthetically generated peptide
  VARIANT (1)...(19): Xaa = Any Amino Acid
PGTXXCGEICAYXAACTGC

SEQ ID NO: 1717 - protein, 20 aa, Artificial Sequence
  Synthetically generated peptide
  VARIANT (1)...(20): Xaa = Any Amino Acid
PGTXXCGEICAYXXAACTGC

SEQ ID NO: 1718 - protein, 20 aa, Artificial Sequence
  Synthetically generated peptide
  VARIANT (1)...(20): Xaa = Any Amino Acid
PGTXXCGEICAYXAXACTGC

SEQ ID NO: 1719 - protein, 20 aa, Artificial Sequence
  Synthetically generated peptide
  VARIANT (1)...(20): Xaa = Any Amino Acid
PGTXXCGEICAYXAAXCTGC

SEQ ID NO: 1720 - protein, 20 aa, Artificial Sequence
  Synthetically generated peptide
  VARIANT (1)...(20): Xaa = Any Amino Acid
PGTXXCGEICAYXAACXTGC

SEQ ID NO: 1721 - protein, 20 aa, Artificial Sequence
  Synthetically generated peptide
  VARIANT (1)...(20): Xaa = Any Amino Acid
PGTXXCGEICAYXAACTXGC

SEQ ID NO: 1722 - protein, 20 aa, Artificial Sequence
  Synthetically generated peptide
  VARIANT (1)...(20): Xaa = Any Amino Acid
PGTXXCGEICAYXAACTGXC

SEQ ID NO: 1723 - protein, 20 aa, Artificial Sequence
  Synthetically generated peptide
  VARIANT (1)...(20): Xaa = Any Amino Acid
PGTXXCGEICAYXAACTGCX

SEQ ID NO: 1724 - protein, 19 aa, Artificial Sequence
  Synthetically generated peptide
  VARIANT (1)...(19): Xaa = Any Amino Acid
PGTXXCGEICAYAXACTGC

SEQ ID NO: 1725 - protein, 20 aa, Artificial Sequence
  Synthetically generated peptide
  VARIANT (1)...(20): Xaa = Any Amino Acid
PGTXXCGEICAYAXXACTGC

SEQ ID NO: 1726 - protein, 20 aa, Artificial Sequence
  Synthetically generated peptide
  VARIANT (1)...(20): Xaa = Any Amino Acid
PGTXXCGEICAYAXAXCTGC

SEQ ID NO: 1727 - protein, 20 aa, Artificial Sequence
  Synthetically generated peptide
  VARIANT (1)...(20): Xaa = Any Amino Acid
PGTXXCGEICAYAXACXTGC

SEQ ID NO: 1728 - protein, 20 aa, Artificial Sequence
  Synthetically generated peptide
  VARIANT (1)...(20): Xaa = Any Amino Acid
PGTXXCGEICAYAXACTXGC

SEQ ID NO: 1729 - protein, 20 aa, Artificial Sequence
  Synthetically generated peptide
  VARIANT (1)...(20): Xaa = Any Amino Acid
PGTXXCGEICAYAXACTGXC

SEQ ID NO: 1730 - protein, 20 aa, Artificial Sequence
  Synthetically generated peptide
  VARIANT (1)...(20): Xaa = Any Amino Acid
PGTXXCGEICAYAXACTGCX

SEQ ID NO: 1731 - protein, 19 aa, Artificial Sequence
  Synthetically generated peptide
  VARIANT (1)...(19): Xaa = Any Amino Acid
PGTXXCGEICAYAAXCTGC

SEQ ID NO: 1732 - protein, 20 aa, Artificial Sequence
  Synthetically generated peptide
  VARIANT (1)...(20): Xaa = Any Amino Acid
PGTXXCGEICAYAAXXCTGC

SEQ ID NO: 1733 - protein, 20 aa, Artificial Sequence
  Synthetically generated peptide
  VARIANT (1)...(20): Xaa = Any Amino Acid
PGTXXCGEICAYAAXCXTGC

SEQ ID NO: 1734 - protein, 20 aa, Artificial Sequence
  Synthetically generated peptide
  VARIANT (1)...(20): Xaa = Any Amino Acid
PGTXXCGEICAYAAXCTXGC

SEQ ID NO: 1735 - protein, 20 aa, Artificial Sequence
  Synthetically generated peptide
  VARIANT (1)...(20): Xaa = Any Amino Acid
PGTXXCGEICAYAAXCTGXC

SEQ ID NO: 1736 - protein, 20 aa, Artificial Sequence
  Synthetically generated peptide
  VARIANT (1)...(20): Xaa = Any Amino Acid
PGTXXCGEICAYAAXCTGCX

SEQ ID NO: 1737 - protein, 19 aa, Artificial Sequence
  Synthetically generated peptide
  VARIANT (1)...(19): Xaa = Any Amino Acid
PGTXXCGEICAYAACXTGC

SEQ ID NO: 1738 - protein, 20 aa, Artificial Sequence
  Synthetically generated peptide
  VARIANT (1)...(20): Xaa = Any Amino Acid
PGTXXCGEICAYAACXXTGC

SEQ ID NO: 1739 - protein, 20 aa, Artificial Sequence
  Synthetically generated peptide
  VARIANT (1)...(20): Xaa = Any Amino Acid
PGTXXCGEICAYAACXTXGC

SEQ ID NO: 1740 - protein, 20 aa, Artificial Sequence
  Synthetically generated peptide
  VARIANT (1)...(20): Xaa = Any Amino Acid
PGTXXCGEICAYAACXTGXC

SEQ ID NO: 1741 - protein, 20 aa, Artificial Sequence
  Synthetically generated peptide
  VARIANT (1)...(20): Xaa = Any Amino Acid
PGTXXCGEICAYAACXTGCX

SEQ ID NO: 1742 - protein, 19 aa, Artificial Sequence
  Synthetically generated peptide
  VARIANT (1)...(19): Xaa = Any Amino Acid
PGTXXCGEICAYAACTXGC

SEQ ID NO: 1743 - protein, 20 aa, Artificial Sequence
  Synthetically generated peptide
  VARIANT (1)...(20): Xaa = Any Amino Acid
PGTXXCGEICAYAACTXXGC

SEQ ID NO: 1744 - protein, 20 aa, Artificial Sequence
  Synthetically generated peptide
  VARIANT (1)...(20): Xaa = Any Amino Acid
PGTXXCGEICAYAACTXGXC

SEQ ID NO: 1745 - protein, 20 aa, Artificial Sequence
  Synthetically generated peptide
  VARIANT (1)...(20): Xaa = Any Amino Acid
PGTXXCGEICAYAACTXGCX

SEQ ID NO: 1746 - protein, 19 aa, Artificial Sequence
  Synthetically generated peptide
  VARIANT (1)...(19): Xaa = Any Amino Acid
PGTXXCGEICAYAACTGXC

SEQ ID NO: 1747 - protein, 20 aa, Artificial Sequence
  Synthetically generated peptide
  VARIANT (1)...(20): Xaa = Any Amino Acid
PGTXXCGEICAYAACTGXXC

SEQ ID NO: 1748 - protein, 20 aa, Artificial Sequence
  Synthetically generated peptide
  VARIANT (1)...(20): Xaa = Any Amino Acid
PGTXXCGEICAYAACTGXCX

SEQ ID NO: 1749 - protein, 19 aa, Artificial Sequence
  Synthetically generated peptide
  VARIANT (1)...(19): Xaa = Any Amino Acid
PGTXXCGEICAYAACTGCX

SEQ ID NO: 1750 - protein, 20 aa, Artificial Sequence
  Synthetically generated peptide
  VARIANT (1)...(20): Xaa = Any Amino Acid
PGTXXCGEICAYAACTGCXX

SEQ ID NO: 1751 - protein, 18 aa, Artificial Sequence
  Synthetically generated peptide
  VARIANT (1)...(18): Xaa = Any Amino Acid
PGTXCXGEICAYAACTGC

SEQ ID NO: 1752 - protein, 19 aa, Artificial Sequence
  Synthetically generated peptide
  VARIANT (1)...(19): Xaa = Any Amino Acid
PGTXCXXGEICAYAACTGC

SEQ ID NO: 1753 - protein, 20 aa, Artificial Sequence
  Synthetically generated peptide
  VARIANT (1)...(20): Xaa = Any Amino Acid
PGTXCXXXGEICAYAACTGC

SEQ ID NO: 1754 - protein, 20 aa, Artificial Sequence
  Synthetically generated peptide
  VARIANT (1)...(20): Xaa = Any Amino Acid
PGTXCXXGXEICAYAACTGC

SEQ ID NO: 1755 - protein, 20 aa, Artificial Sequence
  Synthetically generated peptide
  VARIANT (1)...(20): Xaa = Any Amino Acid
PGTXCXXGEXICAYAACTGC

SEQ ID NO: 1756 - protein, 20 aa, Artificial Sequence
  Synthetically generated peptide
  VARIANT (1)...(20): Xaa = Any Amino Acid
PGTXCXXGEIXCAYAACTGC

SEQ ID NO: 1757 - protein, 20 aa, Artificial Sequence
  Synthetically generated peptide
  VARIANT (1)...(20): Xaa = Any Amino Acid
PGTXCXXGEICXAYAACTGC

SEQ ID NO: 1758 - protein, 20 aa, Artificial Sequence
  Synthetically generated peptide
  VARIANT (1)...(20): Xaa = Any Amino Acid
PGTXCXXGEICAXYAACTGC

SEQ ID NO: 1759 - protein, 20 aa, Artificial Sequence
  Synthetically generated peptide
  VARIANT (1)...(20): Xaa = Any Amino Acid
PGTXCXXGEICAYXAACTGC

SEQ ID NO: 1760 - protein, 20 aa, Artificial Sequence
  Synthetically generated peptide
  VARIANT (1)...(20): Xaa = Any Amino Acid
PGTXCXXGEICAYAXACTGC

SEQ ID NO: 1761 - protein, 20 aa, Artificial Sequence
  Synthetically generated peptide
  VARIANT (1)...(20): Xaa = Any Amino Acid
PGTXCXXGEICAYAAXCTGC

SEQ ID NO: 1762 - protein, 20 aa, Artificial Sequence
  Synthetically generated peptide
  VARIANT (1)...(20): Xaa = Any Amino Acid
PGTXCXXGEICAYAACXTGC

SEQ ID NO: 1763 - protein, 20 aa, Artificial Sequence
  Synthetically generated peptide
  VARIANT (1)...(20): Xaa = Any Amino Acid
PGTXCXXGEICAYAACTXGC

SEQ ID NO: 1764 - protein, 20 aa, Artificial Sequence
  Synthetically generated peptide
  VARIANT (1)...(20): Xaa = Any Amino Acid
PGTXCXXGEICAYAACTGXC

SEQ ID NO: 1765 - protein, 20 aa, Artificial Sequence
  Synthetically generated peptide
  VARIANT (1)...(20): Xaa = Any Amino Acid
PGTXCXXGEICAYAACTGCX

SEQ ID NO: 1766 - protein, 19 aa, Artificial Sequence
  Synthetically generated peptide
  VARIANT (1)...(19): Xaa = Any Amino Acid
PGTXCXGXEICAYAACTGC

SEQ ID NO: 1767 - protein, 20 aa, Artificial Sequence
  Synthetically generated peptide
  VARIANT (1)...(20): Xaa = Any Amino Acid
PGTXCXGXXEICAYAACTGC

SEQ ID NO: 1768 - protein, 20 aa, Artificial Sequence
  Synthetically generated peptide
  VARIANT (1)...(20): Xaa = Any Amino Acid
PGTXCXGXEXICAYAACTGC

SEQ ID NO: 1769 - protein, 20 aa, Artificial Sequence
  Synthetically generated peptide
  VARIANT (1)...(20): Xaa = Any Amino Acid
PGTXCXGXEIXCAYAACTGC

SEQ ID NO: 1770 - protein, 20 aa, Artificial Sequence
  Synthetically generated peptide
  VARIANT (1)...(20): Xaa = Any Amino Acid
PGTXCXGXEICXAYAACTGC

SEQ ID NO: 1771 - protein, 20 aa, Artificial Sequence
  Synthetically generated peptide
  VARIANT (1)...(20): Xaa = Any Amino Acid
PGTXCXGXEICAXYAACTGC

SEQ ID NO: 1772 - protein, 20 aa, Artificial Sequence
  Synthetically generated peptide
  VARIANT (1)...(20): Xaa = Any Amino Acid
PGTXCXGXEICAYXAACTGC

SEQ ID NO: 1773 - protein, 20 aa, Artificial Sequence
  Synthetically generated peptide
  VARIANT (1)...(20): Xaa = Any Amino Acid
PGTXCXGXEICAYAXACTGC

SEQ ID NO: 1774 - protein, 20 aa, Artificial Sequence
  Synthetically generated peptide
  VARIANT (1)...(20): Xaa = Any Amino Acid
PGTXCXGXEICAYAAXCTGC

SEQ ID NO: 1775 - protein, 20 aa, Artificial Sequence
  Synthetically generated peptide
  VARIANT (1)...(20): Xaa = Any Amino Acid
PGTXCXGXEICAYAACXTGC

SEQ ID NO: 1776 - protein, 20 aa, Artificial Sequence
  Synthetically generated peptide
  VARIANT (1)...(20): Xaa = Any Amino Acid
PGTXCXGXEICAYAACTXGC

SEQ ID NO: 1777 - protein, 20 aa, Artificial Sequence
  Synthetically generated peptide
  VARIANT (1)...(20): Xaa = Any Amino Acid
PGTXCXGXEICAYAACTGXC

SEQ ID NO: 1778 - protein, 20 aa, Artificial Sequence
  Synthetically generated peptide
  VARIANT (1)...(20): Xaa = Any Amino Acid
PGTXCXGXEICAYAACTGCX

SEQ ID NO: 1779 - protein, 19 aa, Artificial Sequence
  Synthetically generated peptide
  VARIANT (1)...(19): Xaa = Any Amino Acid
PGTXCXGEXICAYAACTGC

SEQ ID NO: 1780 - protein, 20 aa, Artificial Sequence
  Synthetically generated peptide
  VARIANT (1)...(20): Xaa = Any Amino Acid
PGTXCXGEXXICAYAACTGC

SEQ ID NO: 1781 - protein, 20 aa, Artificial Sequence
  Synthetically generated peptide
  VARIANT (1)...(20): Xaa = Any Amino Acid
PGTXCXGEXIXCAYAACTGC

SEQ ID NO: 1782 - protein, 20 aa, Artificial Sequence
  Synthetically generated peptide
  VARIANT (1)...(20): Xaa = Any Amino Acid
PGTXCXGEXICXAYAACTGC

SEQ ID NO: 1783 - protein, 20 aa, Artificial Sequence
  Synthetically generated peptide
  VARIANT (1)...(20): Xaa = Any Amino Acid
PGTXCXGEXICAXYAACTGC

SEQ ID NO: 1784 - protein, 20 aa, Artificial Sequence
  Synthetically generated peptide
  VARIANT (1)...(20): Xaa = Any Amino Acid
PGTXCXGEXICAYXAACTGC

SEQ ID NO: 1785 - protein, 20 aa, Artificial Sequence
  Synthetically generated peptide
  VARIANT (1)...(20): Xaa = Any Amino Acid
PGTXCXGEXICAYAXACTGC

SEQ ID NO: 1786 - protein, 20 aa, Artificial Sequence
  Synthetically generated peptide
  VARIANT (1)...(20): Xaa = Any Amino Acid
PGTXCXGEXICAYAAXCTGC

SEQ ID NO: 1787 - protein, 20 aa, Artificial Sequence
  Synthetically generated peptide
  VARIANT (1)...(20): Xaa = Any Amino Acid
PGTXCXGEXICAYAACXTGC

SEQ ID NO: 1788 - protein, 20 aa, Artificial Sequence
  Synthetically generated peptide
  VARIANT (1)...(20): Xaa = Any Amino Acid
PGTXCXGEXICAYAACTXGC

SEQ ID NO: 1789 - protein, 20 aa, Artificial Sequence
  Synthetically generated peptide
  VARIANT (1)...(20): Xaa = Any Amino Acid
PGTXCXGEXICAYAACTGXC

SEQ ID NO: 1790 - protein, 20 aa, Artificial Sequence
  Synthetically generated peptide
  VARIANT (1)...(20): Xaa = Any Amino Acid
PGTXCXGEXICAYAACTGCX

SEQ ID NO: 1791 - protein, 19 aa, Artificial Sequence
  Synthetically generated peptide
  VARIANT (1)...(19): Xaa = Any Amino Acid
PGTXCXGEIXCAYAACTGC

SEQ ID NO: 1792 - protein, 20 aa, Artificial Sequence
  Synthetically generated peptide
  VARIANT (1)...(20): Xaa = Any Amino Acid
PGTXCXGEIXXCAYAACTGC

SEQ ID NO: 1793 - protein, 20 aa, Artificial Sequence
  Synthetically generated peptide
  VARIANT (1)...(20): Xaa = Any Amino Acid
PGTXCXGEIXCXAYAACTGC

SEQ ID NO: 1794 - protein, 20 aa, Artificial Sequence
  Synthetically generated peptide
  VARIANT (1)...(20): Xaa = Any Amino Acid
PGTXCXGEIXCAXYAACTGC

SEQ ID NO: 1795 - protein, 20 aa, Artificial Sequence
  Synthetically generated peptide
  VARIANT (1)...(20): Xaa = Any Amino Acid
PGTXCXGEIXCAYXAACTGC

SEQ ID NO: 1796 - protein, 20 aa, Artificial Sequence
  Synthetically generated peptide
  VARIANT (1)...(20): Xaa = Any Amino Acid
PGTXCXGEIXCAYAXACTGC

SEQ ID NO: 1797 - protein, 20 aa, Artificial Sequence
  Synthetically generated peptide
  VARIANT (1)...(20): Xaa = Any Amino Acid
PGTXCXGEIXCAYAAXCTGC

SEQ ID NO: 1798 - protein, 20 aa, Artificial Sequence
  Synthetically generated peptide
  VARIANT (1)...(20): Xaa = Any Amino Acid
PGTXCXGEIXCAYAACXTGC

SEQ ID NO: 1799 - protein, 20 aa, Artificial Sequence
  Synthetically generated peptide
  VARIANT (1)...(20): Xaa = Any Amino Acid
PGTXCXGEIXCAYAACTXGC

SEQ ID NO: 1800 - protein, 20 aa, Artificial Sequence
  Synthetically generated peptide
  VARIANT (1)...(20): Xaa = Any Amino Acid
PGTXCXGEIXCAYAACTGXC

SEQ ID NO: 1801 - protein, 20 aa, Artificial Sequence
  Synthetically generated peptide
  VARIANT (1)...(20): Xaa = Any Amino Acid
PGTXCXGEIXCAYAACTGCX

SEQ ID NO: 1802 - protein, 19 aa, Artificial Sequence
  Synthetically generated peptide
  VARIANT (1)...(19): Xaa = Any Amino Acid
PGTXCXGEICXAYAACTGC

SEQ ID NO: 1803 - protein, 20 aa, Artificial Sequence
  Synthetically generated peptide
  VARIANT (1)...(20): Xaa = Any Amino Acid
PGTXCXGEICXXAYAACTGC

SEQ ID NO: 1804 - protein, 20 aa, Artificial Sequence
  Synthetically generated peptide
  VARIANT (1)...(20): Xaa = Any Amino Acid
PGTXCXGEICXAXYAACTGC

SEQ ID NO: 1805 - protein, 20 aa, Artificial Sequence
  Synthetically generated peptide
  VARIANT (1)...(20): Xaa = Any Amino Acid
PGTXCXGEICXAYXAACTGC

SEQ ID NO: 1806 - protein, 20 aa, Artificial Sequence
  Synthetically generated peptide
  VARIANT (1)...(20): Xaa = Any Amino Acid
PGTXCXGEICXAYAXACTGC

SEQ ID NO: 1807 - protein, 20 aa, Artificial Sequence
  Synthetically generated peptide
  VARIANT (1)...(20): Xaa = Any Amino Acid
PGTXCXGEICXAYAAXCTGC

SEQ ID NO: 1808 - protein, 20 aa, Artificial Sequence
  Synthetically generated peptide
  VARIANT (1)...(20): Xaa = Any Amino Acid
PGTXCXGEICXAYAACXTGC

SEQ ID NO: 1809 - protein, 20 aa, Artificial Sequence
  Synthetically generated peptide
  VARIANT (1)...(20): Xaa = Any Amino Acid
PGTXCXGEICXAYAACTXGC

SEQ ID NO: 1810 - protein, 20 aa, Artificial Sequence
  Synthetically generated peptide
  VARIANT (1)...(20): Xaa = Any Amino Acid
PGTXCXGEICXAYAACTGXC

SEQ ID NO: 1811 - protein, 20 aa, Artificial Sequence
  Synthetically generated peptide
  VARIANT (1)...(20): Xaa = Any Amino Acid
PGTXCXGEICXAYAACTGCX

SEQ ID NO: 1812 - protein, 19 aa, Artificial Sequence
  Synthetically generated peptide
  VARIANT (1)...(19): Xaa = Any Amino Acid
PGTXCXGEICAXYAACTGC

SEQ ID NO: 1813 - protein, 20 aa, Artificial Sequence
  Synthetically generated peptide
  VARIANT (1)...(20): Xaa = Any Amino Acid
PGTXCXGEICAXXYAACTGC

SEQ ID NO: 1814 - protein, 20 aa, Artificial Sequence
  Synthetically generated peptide
  VARIANT (1)...(20): Xaa = Any Amino Acid
PGTXCXGEICAXYXAACTGC

SEQ ID NO: 1815 - protein, 20 aa, Artificial Sequence
  Synthetically generated peptide
  VARIANT (1)...(20): Xaa = Any Amino Acid
PGTXCXGEICAXYAXACTGC

SEQ ID NO: 1816 - protein, 20 aa, Artificial Sequence
  Synthetically generated peptide
  VARIANT (1)...(20): Xaa = Any Amino Acid
PGTXCXGEICAXYAAXCTGC

SEQ ID NO: 1817 - protein, 20 aa, Artificial Sequence
  Synthetically generated peptide
  VARIANT (1)...(20): Xaa = Any Amino Acid
PGTXCXGEICAXYAACXTGC

SEQ ID NO: 1818 - protein, 20 aa, Artificial Sequence
  Synthetically generated peptide
  VARIANT (1)...(20): Xaa = Any Amino Acid
PGTXCXGEICAXYAACTXGC

SEQ ID NO: 1819 - protein, 20 aa, Artificial Sequence
  Synthetically generated peptide
  VARIANT (1)...(20): Xaa = Any Amino Acid
PGTXCXGEICAXYAACTGXC

SEQ ID NO: 1820 - protein, 20 aa, Artificial Sequence
  Synthetically generated peptide
  VARIANT (1)...(20): Xaa = Any Amino Acid
PGTXCXGEICAXYAACTGCX

SEQ ID NO: 1821 - protein, 19 aa, Artificial Sequence
  Synthetically generated peptide
  VARIANT (1)...(19): Xaa = Any Amino Acid
PGTXCXGEICAYXAACTGC

SEQ ID NO: 1822 - protein, 20 aa, Artificial Sequence
  Synthetically generated peptide
  VARIANT (1)...(20): Xaa = Any Amino Acid
PGTXCXGEICAYXXAACTGC

SEQ ID NO: 1823 - protein, 20 aa, Artificial Sequence
  Synthetically generated peptide
  VARIANT (1)...(20): Xaa = Any Amino Acid
PGTXCXGEICAYXAXACTGC

SEQ ID NO: 1824 - protein, 20 aa, Artificial Sequence
  Synthetically generated peptide
  VARIANT (1)...(20): Xaa = Any Amino Acid
PGTXCXGEICAYXAAXCTGC

SEQ ID NO: 1825 - protein, 20 aa, Artificial Sequence
  Synthetically generated peptide
  VARIANT (1)...(20): Xaa = Any Amino Acid
PGTXCXGEICAYXAACXTGC

SEQ ID NO: 1826 - protein, 20 aa, Artificial Sequence
  Synthetically generated peptide
  VARIANT (1)...(20): Xaa = Any Amino Acid
PGTXCXGEICAYXAACTXGC

SEQ ID NO: 1827 - protein, 20 aa, Artificial Sequence
  Synthetically generated peptide
  VARIANT (1)...(20): Xaa = Any Amino Acid
PGTXCXGEICAYXAACTGXC

SEQ ID NO: 1828 - protein, 20 aa, Artificial Sequence
  Synthetically generated peptide
  VARIANT (1)...(20): Xaa = Any Amino Acid
PGTXCXGEICAYXAACTGCX

SEQ ID NO: 1829 - protein, 19 aa, Artificial Sequence
  Synthetically generated peptide
  VARIANT (1)...(19): Xaa = Any Amino Acid
PGTXCXGEICAYAXACTGC

SEQ ID NO: 1830 - protein, 20 aa, Artificial Sequence
  Synthetically generated peptide
  VARIANT (1)...(20): Xaa = Any Amino Acid
PGTXCXGEICAYAXXACTGC

SEQ ID NO: 1831 - protein, 20 aa, Artificial Sequence
  Synthetically generated peptide
  VARIANT (1)...(20): Xaa = Any Amino Acid
PGTXCXGEICAYAXAXCTGC

SEQ ID NO: 1832 - protein, 20 aa, Artificial Sequence
  Synthetically generated peptide
  VARIANT (1)...(20): Xaa = Any Amino Acid
PGTXCXGEICAYAXACXTGC

SEQ ID NO: 1833 - protein, 20 aa, Artificial Sequence
  Synthetically generated peptide
  VARIANT (1)...(20): Xaa = Any Amino Acid
PGTXCXGEICAYAXACTXGC

SEQ ID NO: 1834 - protein, 20 aa, Artificial Sequence
  Synthetically generated peptide
  VARIANT (1)...(20): Xaa = Any Amino Acid
PGTXCXGEICAYAXACTGXC

SEQ ID NO: 1835 - protein, 20 aa, Artificial Sequence
  Synthetically generated peptide
  VARIANT (1)...(20): Xaa = Any Amino Acid
PGTXCXGEICAYAXACTGCX

SEQ ID NO: 1836 - protein, 19 aa, Artificial Sequence
  Synthetically generated peptide
  VARIANT (1)...(19): Xaa = Any Amino Acid
PGTXCXGEICAYAAXCTGC

SEQ ID NO: 1837 - protein, 20 aa, Artificial Sequence
  Synthetically generated peptide
  VARIANT (1)...(20): Xaa = Any Amino Acid
PGTXCXGEICAYAAXXCTGC

SEQ ID NO: 1838 - protein, 20 aa, Artificial Sequence
  Synthetically generated peptide
  VARIANT (1)...(20): Xaa = Any Amino Acid
PGTXCXGEICAYAAXCXTGC

SEQ ID NO: 1839 - protein, 20 aa, Artificial Sequence
  Synthetically generated peptide
  VARIANT (1)...(20): Xaa = Any Amino Acid
PGTXCXGEICAYAAXCTXGC

SEQ ID NO: 1840 - protein, 20 aa, Artificial Sequence
  Synthetically generated peptide
  VARIANT (1)...(20): Xaa = Any Amino Acid
PGTXCXGEICAYAAXCTGXC

SEQ ID NO: 1841 - protein, 20 aa, Artificial Sequence
  Synthetically generated peptide
  VARIANT (1)...(20): Xaa = Any Amino Acid
PGTXCXGEICAYAAXCTGCX

SEQ ID NO: 1842 - protein, 19 aa, Artificial Sequence
  Synthetically generated peptide
  VARIANT (1)...(19): Xaa = Any Amino Acid
PGTXCXGEICAYAACXTGC

SEQ ID NO: 1843 - protein, 20 aa, Artificial Sequence
  Synthetically generated peptide
  VARIANT (1)...(20): Xaa = Any Amino Acid
PGTXCXGEICAYAACXXTGC

SEQ ID NO: 1844 - protein, 20 aa, Artificial Sequence
  Synthetically generated peptide
  VARIANT (1)...(20): Xaa = Any Amino Acid
PGTXCXGEICAYAACXTXGC

SEQ ID NO: 1845 - protein, 20 aa, Artificial Sequence
  Synthetically generated peptide
  VARIANT (1)...(20): Xaa = Any Amino Acid
PGTXCXGEICAYAACXTGXC

SEQ ID NO: 1846 - protein, 20 aa, Artificial Sequence
  Synthetically generated peptide
  VARIANT (1)...(20): Xaa = Any Amino Acid
PGTXCXGEICAYAACXTGCX

SEQ ID NO: 1847 - protein, 19 aa, Artificial Sequence
  Synthetically generated peptide
  VARIANT (1)...(19): Xaa = Any Amino Acid
PGTXCXGEICAYAACTXGC

SEQ ID NO: 1848 - protein, 20 aa, Artificial Sequence
  Synthetically generated peptide
  VARIANT (1)...(20): Xaa = Any Amino Acid
PGTXCXGEICAYAACTXXGC

SEQ ID NO: 1849 - protein, 20 aa, Artificial Sequence
  Synthetically generated peptide
  VARIANT (1)...(20): Xaa = Any Amino Acid
PGTXCXGEICAYAACTXGXC

SEQ ID NO: 1850 - protein, 20 aa, Artificial Sequence
  Synthetically generated peptide
  VARIANT (1)...(20): Xaa = Any Amino Acid
PGTXCXGEICAYAACTXGCX

SEQ ID NO: 1851 - protein, 19 aa, Artificial Sequence
  Synthetically generated peptide
  VARIANT (1)...(19): Xaa = Any Amino Acid
PGTXCXGEICAYAACTGXC

SEQ ID NO: 1852 - protein, 20 aa, Artificial Sequence
  Synthetically generated peptide
  VARIANT (1)...(20): Xaa = Any Amino Acid
PGTXCXGEICAYAACTGXXC

SEQ ID NO: 1853 - protein, 20 aa, Artificial Sequence
  Synthetically generated peptide
  VARIANT (1)...(20): Xaa = Any Amino Acid
PGTXCXGEICAYAACTGXCX

SEQ ID NO: 1854 - protein, 19 aa, Artificial Sequence
  Synthetically generated peptide
  VARIANT (1)...(19): Xaa = Any Amino Acid
PGTXCXGEICAYAACTGCX

SEQ ID NO: 1855 - protein, 20 aa, Artificial Sequence
  Synthetically generated peptide
  VARIANT (1)...(20): Xaa = Any Amino Acid
PGTXCXGEICAYAACTGCXX

SEQ ID NO: 1856 - protein, 18 aa, Artificial Sequence
  Synthetically generated peptide
  VARIANT (1)...(18): Xaa = Any Amino Acid
PGTXCGXEICAYAACTGC

SEQ ID NO: 1857 - protein, 19 aa, Artificial Sequence
  Synthetically generated peptide
  VARIANT (1)...(19): Xaa = Any Amino Acid
PGTXCGXXEICAYAACTGC

SEQ ID NO: 1858 - protein, 20 aa, Artificial Sequence
  Synthetically generated peptide
  VARIANT (1)...(20): Xaa = Any Amino Acid
PGTXCGXXXEICAYAACTGC

SEQ ID NO: 1859 - protein, 20 aa, Artificial Sequence
  Synthetically generated peptide
  VARIANT (1)...(20): Xaa = Any Amino Acid
PGTXCGXXEXICAYAACTGC

SEQ ID NO: 1860 - protein, 20 aa, Artificial Sequence
  Synthetically generated peptide
  VARIANT (1)...(20): Xaa = Any Amino Acid
PGTXCGXXEIXCAYAACTGC

SEQ ID NO: 1861 - protein, 20 aa, Artificial Sequence
  Synthetically generated peptide
  VARIANT (1)...(20): Xaa = Any Amino Acid
PGTXCGXXEICXAYAACTGC

SEQ ID NO: 1862 - protein, 20 aa, Artificial Sequence
  Synthetically generated peptide
  VARIANT (1)...(20): Xaa = Any Amino Acid
PGTXCGXXEICAXYAACTGC

SEQ ID NO: 1863 - protein, 20 aa, Artificial Sequence
  Synthetically generated peptide
  VARIANT (1)...(20): Xaa = Any Amino Acid
PGTXCGXXEICAYXAACTGC

SEQ ID NO: 1864 - protein, 20 aa, Artificial Sequence
  Synthetically generated peptide
  VARIANT (1)...(20): Xaa = Any Amino Acid
PGTXCGXXEICAYAXACTGC

SEQ ID NO: 1865 - protein, 20 aa, Artificial Sequence
  Synthetically generated peptide
  VARIANT (1)...(20): Xaa = Any Amino Acid
PGTXCGXXEICAYAAXCTGC

SEQ ID NO: 1866 - protein, 20 aa, Artificial Sequence
  Synthetically generated peptide
  VARIANT (1)...(20): Xaa = Any Amino Acid
PGTXCGXXEICAYAACXTGC

SEQ ID NO: 1867 - protein, 20 aa, Artificial Sequence
  Synthetically generated peptide
  VARIANT (1)...(20): Xaa = Any Amino Acid
PGTXCGXXEICAYAACTXGC

SEQ ID NO: 1868 - protein, 20 aa, Artificial Sequence
  Synthetically generated peptide
  VARIANT (1)...(20): Xaa = Any Amino Acid
PGTXCGXXEICAYAACTGXC

SEQ ID NO: 1869 - protein, 20 aa, Artificial Sequence
  Synthetically generated peptide
  VARIANT (1)...(20): Xaa = Any Amino Acid
PGTXCGXXEICAYAACTGCX

SEQ ID NO: 1870 - protein, 19 aa, Artificial Sequence
  Synthetically generated peptide
  VARIANT (1)...(19): Xaa = Any Amino Acid
PGTXCGXEXICAYAACTGC

SEQ ID NO: 1871 - protein, 20 aa, Artificial Sequence
  Synthetically generated peptide
  VARIANT (1)...(20): Xaa = Any Amino Acid
PGTXCGXEXXICAYAACTGC

SEQ ID NO: 1872 - protein, 20 aa, Artificial Sequence
  Synthetically generated peptide
  VARIANT (1)...(20): Xaa = Any Amino Acid
PGTXCGXEXIXCAYAACTGC

SEQ ID NO: 1873 - protein, 20 aa, Artificial Sequence
  Synthetically generated peptide
  VARIANT (1)...(20): Xaa = Any Amino Acid
PGTXCGXEXICXAYAACTGC

SEQ ID NO: 1874 - protein, 20 aa, Artificial Sequence
  Synthetically generated peptide
  VARIANT (1)...(20): Xaa = Any Amino Acid
PGTXCGXEXICAXYAACTGC

SEQ ID NO: 1875 - protein, 20 aa, Artificial Sequence
  Synthetically generated peptide
  VARIANT (1)...(20): Xaa = Any Amino Acid
PGTXCGXEXICAYXAACTGC

SEQ ID NO: 1876 - protein, 20 aa, Artificial Sequence
  Synthetically generated peptide
  VARIANT (1)...(20): Xaa = Any Amino Acid
PGTXCGXEXICAYAXACTGC

SEQ ID NO: 1877 - protein, 20 aa, Artificial Sequence
  Synthetically generated peptide
  VARIANT (1)...(20): Xaa = Any Amino Acid
PGTXCGXEXICAYAAXCTGC

SEQ ID NO: 1878 - protein, 20 aa, Artificial Sequence
  Synthetically generated peptide
  VARIANT (1)...(20): Xaa = Any Amino Acid
PGTXCGXEXICAYAACXTGC

SEQ ID NO: 1879 - protein, 20 aa, Artificial Sequence
  Synthetically generated peptide
  VARIANT (1)...(20): Xaa = Any Amino Acid
PGTXCGXEXICAYAACTXGC

SEQ ID NO: 1880 - protein, 20 aa, Artificial Sequence
  Synthetically generated peptide
  VARIANT (1)...(20): Xaa = Any Amino Acid
PGTXCGXEXICAYAACTGXC

SEQ ID NO: 1881 - protein, 20 aa, Artificial Sequence
  Synthetically generated peptide
  VARIANT (1)...(20): Xaa = Any Amino Acid
PGTXCGXEXICAYAACTGCX

SEQ ID NO: 1882 - protein, 19 aa, Artificial Sequence
  Synthetically generated peptide
  VARIANT (1)...(19): Xaa = Any Amino Acid
PGTXCGXEIXCAYAACTGC

SEQ ID NO: 1883 - protein, 20 aa, Artificial Sequence
  Synthetically generated peptide
  VARIANT (1)...(20): Xaa = Any Amino Acid
PGTXCGXEIXXCAYAACTGC

SEQ ID NO: 1884 - protein, 20 aa, Artificial Sequence
  Synthetically generated peptide
  VARIANT (1)...(20): Xaa = Any Amino Acid
PGTXCGXEIXCXAYAACTGC

SEQ ID NO: 1885 - protein, 20 aa, Artificial Sequence
  Synthetically generated peptide
  VARIANT (1)...(20): Xaa = Any Amino Acid
PGTXCGXEIXCAXYAACTGC

SEQ ID NO: 1886 - protein, 20 aa, Artificial Sequence
  Synthetically generated peptide
  VARIANT (1)...(20): Xaa = Any Amino Acid
PGTXCGXEIXCAYXAACTGC

SEQ ID NO: 1887 - protein, 20 aa, Artificial Sequence
  Synthetically generated peptide
  VARIANT (1)...(20): Xaa = Any Amino Acid
PGTXCGXEIXCAYAXACTGC

SEQ ID NO: 1888 - protein, 20 aa, Artificial Sequence
  Synthetically generated peptide
  VARIANT (1)...(20): Xaa = Any Amino Acid
PGTXCGXEIXCAYAAXCTGC

SEQ ID NO: 1889 - protein, 20 aa, Artificial Sequence
  Synthetically generated peptide
  VARIANT (1)...(20): Xaa = Any Amino Acid
PGTXCGXEIXCAYAACXTGC

SEQ ID NO: 1890 - protein, 20 aa, Artificial Sequence
  Synthetically generated peptide
  VARIANT (1)...(20): Xaa = Any Amino Acid
PGTXCGXEIXCAYAACTXGC

SEQ ID NO: 1891 - protein, 20 aa, Artificial Sequence
  Synthetically generated peptide
  VARIANT (1)...(20): Xaa = Any Amino Acid
PGTXCGXEIXCAYAACTGXC

SEQ ID NO: 1892 - protein, 20 aa, Artificial Sequence
  Synthetically generated peptide
  VARIANT (1)...(20): Xaa = Any Amino Acid
PGTXCGXEIXCAYAACTGCX

SEQ ID NO: 1893 - protein, 19 aa, Artificial Sequence
  Synthetically generated peptide
  VARIANT (1)...(19): Xaa = Any Amino Acid
PGTXCGXEICXAYAACTGC

SEQ ID NO: 1894 - protein, 20 aa, Artificial Sequence
  Synthetically generated peptide
  VARIANT (1)...(20): Xaa = Any Amino Acid
PGTXCGXEICXXAYAACTGC

SEQ ID NO: 1895 - protein, 20 aa, Artificial Sequence
  Synthetically generated peptide
  VARIANT (1)...(20): Xaa = Any Amino Acid
PGTXCGXEICXAXYAACTGC

SEQ ID NO: 1896 - protein, 20 aa, Artificial Sequence
  Synthetically generated peptide
  VARIANT (1)...(20): Xaa = Any Amino Acid
PGTXCGXEICXAYXAACTGC

SEQ ID NO: 1897 - protein, 20 aa, Artificial Sequence
  Synthetically generated peptide
  VARIANT (1)...(20): Xaa = Any Amino Acid
PGTXCGXEICXAYAXACTGC

SEQ ID NO: 1898 - protein, 20 aa, Artificial Sequence
  Synthetically generated peptide
  VARIANT (1)...(20): Xaa = Any Amino Acid
PGTXCGXEICXAYAAXCTGC

SEQ ID NO: 1899 - protein, 20 aa, Artificial Sequence
  Synthetically generated peptide
  VARIANT (1)...(20): Xaa = Any Amino Acid
PGTXCGXEICXAYAACXTGC

SEQ ID NO: 1900 - protein, 20 aa, Artificial Sequence
  Synthetically generated peptide
  VARIANT (1)...(20): Xaa = Any Amino Acid
PGTXCGXEICXAYAACTXGC

SEQ ID NO: 1901 - protein, 20 aa, Artificial Sequence
  Synthetically generated peptide
  VARIANT (1)...(20): Xaa = Any Amino Acid
PGTXCGXEICXAYAACTGXC

SEQ ID NO: 1902 - protein, 20 aa, Artificial Sequence
  Synthetically generated peptide
  VARIANT (1)...(20): Xaa = Any Amino Acid
PGTXCGXEICXAYAACTGCX

SEQ ID NO: 1903 - protein, 19 aa, Artificial Sequence
  Synthetically generated peptide
  VARIANT (1)...(19): Xaa = Any Amino Acid
PGTXCGXEICAXYAACTGC

SEQ ID NO: 1904 - protein, 20 aa, Artificial Sequence
  Synthetically generated peptide
  VARIANT (1)...(20): Xaa = Any Amino Acid
PGTXCGXEICAXXYAACTGC

SEQ ID NO: 1905 - protein, 20 aa, Artificial Sequence
  Synthetically generated peptide
  VARIANT (1)...(20): Xaa = Any Amino Acid
PGTXCGXEICAXYXAACTGC

SEQ ID NO: 1906 - protein, 20 aa, Artificial Sequence
  Synthetically generated peptide
  VARIANT (1)...(20): Xaa = Any Amino Acid
PGTXCGXEICAXYAXACTGC

SEQ ID NO: 1907 - protein, 20 aa, Artificial Sequence
  Synthetically generated peptide
  VARIANT (1)...(20): Xaa = Any Amino Acid
PGTXCGXEICAXYAAXCTGC

SEQ ID NO: 1908 - protein, 20 aa, Artificial Sequence
  Synthetically generated peptide
  VARIANT (1)...(20): Xaa = Any Amino Acid
PGTXCGXEICAXYAACXTGC

SEQ ID NO: 1909 - protein, 20 aa, Artificial Sequence
  Synthetically generated peptide
  VARIANT (1)...(20): Xaa = Any Amino Acid
PGTXCGXEICAXYAACTXGC

SEQ ID NO: 1910 - protein, 20 aa, Artificial Sequence
  Synthetically generated peptide
  VARIANT (1)...(20): Xaa = Any Amino Acid
PGTXCGXEICAXYAACTGXC

SEQ ID NO: 1911 - protein, 20 aa, Artificial Sequence
  Synthetically generated peptide
  VARIANT (1)...(20): Xaa = Any Amino Acid
PGTXCGXEICAXYAACTGCX

SEQ ID NO: 1912 - protein, 19 aa, Artificial Sequence
  Synthetically generated peptide
  VARIANT (1)...(19): Xaa = Any Amino Acid
PGTXCGXEICAYXAACTGC

SEQ ID NO: 1913 - protein, 20 aa, Artificial Sequence
  Synthetically generated peptide
  VARIANT (1)...(20): Xaa = Any Amino Acid
PGTXCGXEICAYXXAACTGC

SEQ ID NO: 1914 - protein, 20 aa, Artificial Sequence
  Synthetically generated peptide
  VARIANT (1)...(20): Xaa = Any Amino Acid
PGTXCGXEICAYXAXACTGC

SEQ ID NO: 1915 - protein, 20 aa, Artificial Sequence
  Synthetically generated peptide
  VARIANT (1)...(20): Xaa = Any Amino Acid
PGTXCGXEICAYXAAXCTGC

SEQ ID NO: 1916 - protein, 20 aa, Artificial Sequence
  Synthetically generated peptide
  VARIANT (1)...(20): Xaa = Any Amino Acid
PGTXCGXEICAYXAACXTGC

SEQ ID NO: 1917 - protein, 20 aa, Artificial Sequence
  Synthetically generated peptide
  VARIANT (1)...(20): Xaa = Any Amino Acid
PGTXCGXEICAYXAACTXGC

SEQ ID NO: 1918 - protein, 20 aa, Artificial Sequence
  Synthetically generated peptide
  VARIANT (1)...(20): Xaa = Any Amino Acid
PGTXCGXEICAYXAACTGXC

SEQ ID NO: 1919 - protein, 20 aa, Artificial Sequence
  Synthetically generated peptide
  VARIANT (1)...(20): Xaa = Any Amino Acid
PGTXCGXEICAYXAACTGCX

SEQ ID NO: 1920 - protein, 19 aa, Artificial Sequence
  Synthetically generated peptide
  VARIANT (1)...(19): Xaa = Any Amino Acid
PGTXCGXEICAYAXACTGC

SEQ ID NO: 1921 - protein, 20 aa, Artificial Sequence
  Synthetically generated peptide
  VARIANT (1)...(20): Xaa = Any Amino Acid
PGTXCGXEICAYAXXACTGC

SEQ ID NO: 1922 - protein, 20 aa, Artificial Sequence
  Synthetically generated peptide
  VARIANT (1)...(20): Xaa = Any Amino Acid
PGTXCGXEICAYAXAXCTGC

SEQ ID NO: 1923 - protein, 20 aa, Artificial Sequence
  Synthetically generated peptide
  VARIANT (1)...(20): Xaa = Any Amino Acid
PGTXCGXEICAYAXACXTGC

SEQ ID NO: 1924 - protein, 20 aa, Artificial Sequence
  Synthetically generated peptide
  VARIANT (1)...(20): Xaa = Any Amino Acid
PGTXCGXEICAYAXACTXGC

SEQ ID NO: 1925 - protein, 20 aa, Artificial Sequence
  Synthetically generated peptide
  VARIANT (1)...(20): Xaa = Any Amino Acid
PGTXCGXEICAYAXACTGXC

SEQ ID NO: 1926 - protein, 20 aa, Artificial Sequence
  Synthetically generated peptide
  VARIANT (1)...(20): Xaa = Any Amino Acid
PGTXCGXEICAYAXACTGCX

SEQ ID NO: 1927 - protein, 19 aa, Artificial Sequence
  Synthetically generated peptide
  VARIANT (1)...(19): Xaa = Any Amino Acid
PGTXCGXEICAYAAXCTGC

SEQ ID NO: 1928 - protein, 20 aa, Artificial Sequence
  Synthetically generated peptide
  VARIANT (1)...(20): Xaa = Any Amino Acid
PGTXCGXEICAYAAXXCTGC

SEQ ID NO: 1929 - protein, 20 aa, Artificial Sequence
  Synthetically generated peptide
  VARIANT (1)...(20): Xaa = Any Amino Acid
PGTXCGXEICAYAAXCXTGC

SEQ ID NO: 1930 - protein, 20 aa, Artificial Sequence
  Synthetically generated peptide
  VARIANT (1)...(20): Xaa = Any Amino Acid
PGTXCGXEICAYAAXCTXGC

SEQ ID NO: 1931 - protein, 20 aa, Artificial Sequence
  Synthetically generated peptide
  VARIANT (1)...(20): Xaa = Any Amino Acid
PGTXCGXEICAYAAXCTGXC

SEQ ID NO: 1932 - protein, 20 aa, Artificial Sequence
  Synthetically generated peptide
  VARIANT (1)...(20): Xaa = Any Amino Acid
PGTXCGXEICAYAAXCTGCX

SEQ ID NO: 1933 - protein, 19 aa, Artificial Sequence
  Synthetically generated peptide
  VARIANT (1)...(19): Xaa = Any Amino Acid
PGTXCGXEICAYAACXTGC

SEQ ID NO: 1934 - protein, 20 aa, Artificial Sequence
  Synthetically generated peptide
  VARIANT (1)...(20): Xaa = Any Amino Acid
PGTXCGXEICAYAACXXTGC

SEQ ID NO: 1935 - protein, 20 aa, Artificial Sequence
  Synthetically generated peptide
  VARIANT (1)...(20): Xaa = Any Amino Acid
PGTXCGXEICAYAACXTXGC

SEQ ID NO: 1936 - protein, 20 aa, Artificial Sequence
  Synthetically generated peptide
  VARIANT (1)...(20): Xaa = Any Amino Acid
PGTXCGXEICAYAACXTGXC

SEQ ID NO: 1937 - protein, 20 aa, Artificial Sequence
  Synthetically generated peptide
  VARIANT (1)...(20): Xaa = Any Amino Acid
PGTXCGXEICAYAACXTGCX

SEQ ID NO: 1938 - protein, 19 aa, Artificial Sequence
  Synthetically generated peptide
  VARIANT (1)...(19): Xaa = Any Amino Acid
PGTXCGXEICAYAACTXGC

SEQ ID NO: 1939 - protein, 20 aa, Artificial Sequence
  Synthetically generated peptide
  VARIANT (1)...(20): Xaa = Any Amino Acid
PGTXCGXEICAYAACTXXGC

SEQ ID NO: 1940 - protein, 20 aa, Artificial Sequence
  Synthetically generated peptide
  VARIANT (1)...(20): Xaa = Any Amino Acid
PGTXCGXEICAYAACTXGXC

SEQ ID NO: 1941 - protein, 20 aa, Artificial Sequence
  Synthetically generated peptide
  VARIANT (1)...(20): Xaa = Any Amino Acid
PGTXCGXEICAYAACTXGCX

SEQ ID NO: 1942 - protein, 19 aa, Artificial Sequence
  Synthetically generated peptide
  VARIANT (1)...(19): Xaa = Any Amino Acid
PGTXCGXEICAYAACTGXC

SEQ ID NO: 1943 - protein, 20 aa, Artificial Sequence
  Synthetically generated peptide
  VARIANT (1)...(20): Xaa = Any Amino Acid
PGTXCGXEICAYAACTGXXC

SEQ ID NO: 1944 - protein, 20 aa, Artificial Sequence
  Synthetically generated peptide
  VARIANT (1)...(20): Xaa = Any Amino Acid
PGTXCGXEICAYAACTGXCX

SEQ ID NO: 1945 - protein, 19 aa, Artificial Sequence
  Synthetically generated peptide
  VARIANT (1)...(19): Xaa = Any Amino Acid
PGTXCGXEICAYAACTGCX

SEQ ID NO: 1946 - protein, 20 aa, Artificial Sequence
  Synthetically generated peptide
  VARIANT (1)...(20): Xaa = Any Amino Acid
PGTXCGXEICAYAACTGCXX

SEQ ID NO: 1947 - protein, 18 aa, Artificial Sequence
  Synthetically generated peptide
  VARIANT (1)...(18): Xaa = Any Amino Acid
PGTXCGEXICAYAACTGC

SEQ ID NO: 1948 - protein, 19 aa, Artificial Sequence
  Synthetically generated peptide
  VARIANT (1)...(19): Xaa = Any Amino Acid
PGTXCGEXXICAYAACTGC

SEQ ID NO: 1949 - protein, 20 aa, Artificial Sequence
  Synthetically generated peptide
  VARIANT (1)...(20): Xaa = Any Amino Acid
PGTXCGEXXXICAYAACTGC

SEQ ID NO: 1950 - protein, 20 aa, Artificial Sequence
  Synthetically generated peptide
  VARIANT (1)...(20): Xaa = Any Amino Acid
PGTXCGEXXIXCAYAACTGC

SEQ ID NO: 1951 - protein, 20 aa, Artificial Sequence
  Synthetically generated peptide
  VARIANT (1)...(20): Xaa = Any Amino Acid
PGTXCGEXXICXAYAACTGC

SEQ ID NO: 1952 - protein, 20 aa, Artificial Sequence
  Synthetically generated peptide
  VARIANT (1)...(20): Xaa = Any Amino Acid
PGTXCGEXXICAXYAACTGC

SEQ ID NO: 1953 - protein, 20 aa, Artificial Sequence
  Synthetically generated peptide
  VARIANT (1)...(20): Xaa = Any Amino Acid
PGTXCGEXXICAYXAACTGC

SEQ ID NO: 1954 - protein, 20 aa, Artificial Sequence
  Synthetically generated peptide
  VARIANT (1)...(20): Xaa = Any Amino Acid
PGTXCGEXXICAYAXACTGC

SEQ ID NO: 1955 - protein, 20 aa, Artificial Sequence
  Synthetically generated peptide
  VARIANT (1)...(20): Xaa = Any Amino Acid
PGTXCGEXXICAYAAXCTGC

SEQ ID NO: 1956 - protein, 20 aa, Artificial Sequence
  Synthetically generated peptide
  VARIANT (1)...(20): Xaa = Any Amino Acid
PGTXCGEXXICAYAACXTGC

SEQ ID NO: 1957 - protein, 20 aa, Artificial Sequence
  Synthetically generated peptide
  VARIANT (1)...(20): Xaa = Any Amino Acid
PGTXCGEXXICAYAACTXGC

SEQ ID NO: 1958 - protein, 20 aa, Artificial Sequence
  Synthetically generated peptide
  VARIANT (1)...(20): Xaa = Any Amino Acid
PGTXCGEXXICAYAACTGXC

SEQ ID NO: 1959 - protein, 20 aa, Artificial Sequence
  Synthetically generated peptide
  VARIANT (1)...(20): Xaa = Any Amino Acid
PGTXCGEXXICAYAACTGCX

SEQ ID NO: 1960 - protein, 19 aa, Artificial Sequence
  Synthetically generated peptide
  VARIANT (1)...(19): Xaa = Any Amino Acid
PGTXCGEXIXCAYAACTGC

SEQ ID NO: 1961 - protein, 20 aa, Artificial Sequence
  Synthetically generated peptide
  VARIANT (1)...(20): Xaa = Any Amino Acid
PGTXCGEXIXXCAYAACTGC

SEQ ID NO: 1962 - protein, 20 aa, Artificial Sequence
  Synthetically generated peptide
  VARIANT (1)...(20): Xaa = Any Amino Acid
PGTXCGEXIXCXAYAACTGC

SEQ ID NO: 1963 - protein, 20 aa, Artificial Sequence
  Synthetically generated peptide
  VARIANT (1)...(20): Xaa = Any Amino Acid
PGTXCGEXIXCAXYAACTGC

SEQ ID NO: 1964 - protein, 20 aa, Artificial Sequence
  Synthetically generated peptide
  VARIANT (1)...(20): Xaa = Any Amino Acid
PGTXCGEXIXCAYXAACTGC

SEQ ID NO: 1965 - protein, 20 aa, Artificial Sequence
  Synthetically generated peptide
  VARIANT (1)...(20): Xaa = Any Amino Acid
PGTXCGEXIXCAYAXACTGC

SEQ ID NO: 1966 - protein, 20 aa, Artificial Sequence
  Synthetically generated peptide
  VARIANT (1)...(20): Xaa = Any Amino Acid
PGTXCGEXIXCAYAAXCTGC

SEQ ID NO: 1967 - protein, 20 aa, Artificial Sequence
  Synthetically generated peptide
  VARIANT (1)...(20): Xaa = Any Amino Acid
PGTXCGEXIXCAYAACXTGC

SEQ ID NO: 1968 - protein, 20 aa, Artificial Sequence
  Synthetically generated peptide
  VARIANT (1)...(20): Xaa = Any Amino Acid
PGTXCGEXIXCAYAACTXGC

SEQ ID NO: 1969 - protein, 20 aa, Artificial Sequence
  Synthetically generated peptide
  VARIANT (1)...(20): Xaa = Any Amino Acid
PGTXCGEXIXCAYAACTGXC

SEQ ID NO: 1970 - protein, 20 aa, Artificial Sequence
  Synthetically generated peptide
  VARIANT (1)...(20): Xaa = Any Amino Acid
PGTXCGEXIXCAYAACTGCX

SEQ ID NO: 1971 - protein, 19 aa, Artificial Sequence
  Synthetically generated peptide
  VARIANT (1)...(19): Xaa = Any Amino Acid
PGTXCGEXICXAYAACTGC

SEQ ID NO: 1972 - protein, 20 aa, Artificial Sequence
  Synthetically generated peptide
  VARIANT (1)...(20): Xaa = Any Amino Acid
PGTXCGEXICXXAYAACTGC

SEQ ID NO: 1973 - protein, 20 aa, Artificial Sequence
  Synthetically generated peptide
  VARIANT (1)...(20): Xaa = Any Amino Acid
PGTXCGEXICXAXYAACTGC

SEQ ID NO: 1974 - protein, 20 aa, Artificial Sequence
  Synthetically generated peptide
  VARIANT (1)...(20): Xaa = Any Amino Acid
PGTXCGEXICXAYXAACTGC

SEQ ID NO: 1975 - protein, 20 aa, Artificial Sequence
  Synthetically generated peptide
  VARIANT (1)...(20): Xaa = Any Amino Acid
PGTXCGEXICXAYAXACTGC

SEQ ID NO: 1976 - protein, 20 aa, Artificial Sequence
  Synthetically generated peptide
  VARIANT (1)...(20): Xaa = Any Amino Acid
PGTXCGEXICXAYAAXCTGC

SEQ ID NO: 1977 - protein, 20 aa, Artificial Sequence
  Synthetically generated peptide
  VARIANT (1)...(20): Xaa = Any Amino Acid
PGTXCGEXICXAYAACXTGC

SEQ ID NO: 1978 - protein, 20 aa, Artificial Sequence
  Synthetically generated peptide
  VARIANT (1)...(20): Xaa = Any Amino Acid
PGTXCGEXICXAYAACTXGC

SEQ ID NO: 1979 - protein, 20 aa, Artificial Sequence
  Synthetically generated peptide
  VARIANT (1)...(20): Xaa = Any Amino Acid
PGTXCGEXICXAYAACTGXC

SEQ ID NO: 1980 - protein, 20 aa, Artificial Sequence
  Synthetically generated peptide
  VARIANT (1)...(20): Xaa = Any Amino Acid
  VARIANT (1)...(20): Xaa = Any Amino Acid
PGTXCGEXICXAYAACTGCX

SEQ ID NO: 1981 - protein, 19 aa, Artificial Sequence
  Synthetically generated peptide
  VARIANT (1)...(19): Xaa = Any Amino Acid
  VARIANT (1)...(19): Xaa = Any Amino Acid
PGTXCGEXICAXYAACTGC

SEQ ID NO: 1982 - protein, 20 aa, Artificial Sequence
  Synthetically generated peptide
  VARIANT (1)...(20): Xaa = Any Amino Acid
  VARIANT (1)...(20): Xaa = Any Amino Acid
PGTXCGEXICAXXYAACTGC

SEQ ID NO: 1983 - protein, 20 aa, Artificial Sequence
  Synthetically generated peptide
  VARIANT (1)...(20): Xaa = Any Amino Acid
  VARIANT (1)...(20): Xaa = Any Amino Acid
PGTXCGEXICAXYXAACTGC

SEQ ID NO: 1984 - protein, 20 aa, Artificial Sequence
  Synthetically generated peptide
  VARIANT (1)...(20): Xaa = Any Amino Acid
  VARIANT (1)...(20): Xaa = Any Amino Acid
PGTXCGEXICAXYAXACTGC

SEQ ID NO: 1985 - protein, 20 aa, Artificial Sequence
  Synthetically generated peptide
  VARIANT (1)...(20): Xaa = Any Amino Acid
  VARIANT (1)...(20): Xaa = Any Amino Acid
PGTXCGEXICAXYAAXCTGC

SEQ ID NO: 1986 - protein, 20 aa, Artificial Sequence
  Synthetically generated peptide
  VARIANT (1)...(20): Xaa = Any Amino Acid
  VARIANT (1)...(20): Xaa = Any Amino Acid
PGTXCGEXICAXYAACXTGC

SEQ ID NO: 1987 - protein, 20 aa, Artificial Sequence
  Synthetically generated peptide
  VARIANT (1)...(20): Xaa = Any Amino Acid
  VARIANT (1)...(20): Xaa = Any Amino Acid
PGTXCGEXICAXYAACTXGC

SEQ ID NO: 1988 - protein, 20 aa, Artificial Sequence
  Synthetically generated peptide
  VARIANT (1)...(20): Xaa = Any Amino Acid
  VARIANT (1)...(20): Xaa = Any Amino Acid
PGTXCGEXICAXYAACTGXC

SEQ ID NO: 1989 - protein, 20 aa, Artificial Sequence
  Synthetically generated peptide
  VARIANT (1)...(20): Xaa = Any Amino Acid
  VARIANT (1)...(20): Xaa = Any Amino Acid
PGTXCGEXICAXYAACTGCX

SEQ ID NO: 1990 - protein, 19 aa, Artificial Sequence
  Synthetically generated peptide
  VARIANT (1)...(19): Xaa = Any Amino Acid
  VARIANT (1)...(19): Xaa = Any Amino Acid
PGTXCGEXICAYXAACTGC

SEQ ID NO: 1991 - protein, 20 aa, Artificial Sequence
  Synthetically generated peptide
  VARIANT (1)...(20): Xaa = Any Amino Acid
  VARIANT (1)...(20): Xaa = Any Amino Acid
PGTXCGEXICAYXXAACTGC

SEQ ID NO: 1992 - protein, 20 aa, Artificial Sequence
  Synthetically generated peptide
  VARIANT (1)...(20): Xaa = Any Amino Acid
  VARIANT (1)...(20): Xaa = Any Amino Acid
PGTXCGEXICAYXAXACTGC

SEQ ID NO: 1993 - protein, 20 aa, Artificial Sequence
  Synthetically generated peptide
  VARIANT (1)...(20): Xaa = Any Amino Acid
  VARIANT (1)...(20): Xaa = Any Amino Acid
PGTXCGEXICAYXAAXCTGC

SEQ ID NO: 1994 - protein, 20 aa, Artificial Sequence
  Synthetically generated peptide
  VARIANT (1)...(20): Xaa = Any Amino Acid
  VARIANT (1)...(20): Xaa = Any Amino Acid
PGTXCGEXICAYXAACXTGC

SEQ ID NO: 1995 - protein, 20 aa, Artificial Sequence
  Synthetically generated peptide
  VARIANT (1)...(20): Xaa = Any Amino Acid
  VARIANT (1)...(20): Xaa = Any Amino Acid
PGTXCGEXICAYXAACTXGC

SEQ ID NO: 1996 - protein, 20 aa, Artificial Sequence
  Synthetically generated peptide
  VARIANT (1)...(20): Xaa = Any Amino Acid
  VARIANT (1)...(20): Xaa = Any Amino Acid
PGTXCGEXICAYXAACTGXC

SEQ ID NO: 1997 - protein, 20 aa, Artificial Sequence
  Synthetically generated peptide
  VARIANT (1)...(20): Xaa = Any Amino Acid
  VARIANT (1)...(20): Xaa = Any Amino Acid
PGTXCGEXICAYXAACTGCX

SEQ ID NO: 1998 - protein, 19 aa, Artificial Sequence
  Synthetically generated peptide
  VARIANT (1)...(19): Xaa = Any Amino Acid
  VARIANT (1)...(19): Xaa = Any Amino Acid
PGTXCGEXICAYAXACTGC

SEQ ID NO: 1999 - protein, 20 aa, Artificial Sequence
  Synthetically generated peptide
  VARIANT (1)...(20): Xaa = Any Amino Acid
  VARIANT (1)...(20): Xaa = Any Amino Acid
PGTXCGEXICAYAXXACTGC

SEQ ID NO: 2000 - protein, 20 aa, Artificial Sequence
  Synthetically generated peptide
  VARIANT (1)...(20): Xaa = Any Amino Acid
  VARIANT (1)...(20): Xaa = Any Amino Acid
PGTXCGEXICAYAXAXCTGC

SEQ ID NO: 2001 - protein, 20 aa, Artificial Sequence
  Synthetically generated peptide
  VARIANT (1)...(20): Xaa = Any Amino Acid
  VARIANT (1)...(20): Xaa = Any Amino Acid
PGTXCGEXICAYAXACXTGC

SEQ ID NO: 2002 - protein, 20 aa, Artificial Sequence
  Synthetically generated peptide
  VARIANT (1)...(20): Xaa = Any Amino Acid
  VARIANT (1)...(20): Xaa = Any Amino Acid
PGTXCGEXICAYAXACTXGC

SEQ ID NO: 2003 - protein, 20 aa, Artificial Sequence
  Synthetically generated peptide
  VARIANT (1)...(20): Xaa = Any Amino Acid
  VARIANT (1)...(20): Xaa = Any Amino Acid
PGTXCGEXICAYAXACTGXC

SEQ ID NO: 2004 - protein, 20 aa, Artificial Sequence
  Synthetically generated peptide
  VARIANT (1)...(20): Xaa = Any Amino Acid
  VARIANT (1)...(20): Xaa = Any Amino Acid
PGTXCGEXICAYAXACTGCX

SEQ ID NO: 2005 - protein, 19 aa, Artificial Sequence
  Synthetically generated peptide
  VARIANT (1)...(19): Xaa = Any Amino Acid
  VARIANT (1)...(19): Xaa = Any Amino Acid
PGTXCGEXICAYAAXCTGC

SEQ ID NO: 2006 - protein, 20 aa, Artificial Sequence
  Synthetically generated peptide
  VARIANT (1)...(20): Xaa = Any Amino Acid
  VARIANT (1)...(20): Xaa = Any Amino Acid
PGTXCGEXICAYAAXXCTGC

SEQ ID NO: 2007 - protein, 20 aa, Artificial Sequence
  Synthetically generated peptide
  VARIANT (1)...(20): Xaa = Any Amino Acid
  VARIANT (1)...(20): Xaa = Any Amino Acid
PGTXCGEXICAYAAXCXTGC

SEQ ID NO: 2008 - protein, 20 aa, Artificial Sequence
  Synthetically generated peptide
  VARIANT (1)...(20): Xaa = Any Amino Acid
  VARIANT (1)...(20): Xaa = Any Amino Acid
PGTXCGEXICAYAAXCTXGC

SEQ ID NO: 2009 - protein, 20 aa, Artificial Sequence
  Synthetically generated peptide
  VARIANT (1)...(20): Xaa = Any Amino Acid
  VARIANT (1)...(20): Xaa = Any Amino Acid
PGTXCGEXICAYAAXCTGXC

SEQ ID NO: 2010 - protein, 20 aa, Artificial Sequence
  Synthetically generated peptide
  VARIANT (1)...(20): Xaa = Any Amino Acid
  VARIANT (1)...(20): Xaa = Any Amino Acid
PGTXCGEXICAYAAXCTGCX

SEQ ID NO: 2011 - protein, 19 aa, Artificial Sequence
  Synthetically generated peptide
  VARIANT (1)...(19): Xaa = Any Amino Acid
  VARIANT (1)...(19): Xaa = Any Amino Acid
PGTXCGEXICAYAACXTGC

SEQ ID NO: 2012 - protein, 20 aa, Artificial Sequence
  Synthetically generated peptide
  VARIANT (1)...(20): Xaa = Any Amino Acid
  VARIANT (1)...(20): Xaa = Any Amino Acid
PGTXCGEXICAYAACXXTGC

SEQ ID NO: 2013 - protein, 20 aa, Artificial Sequence
  Synthetically generated peptide
  VARIANT (1)...(20): Xaa = Any Amino Acid
  VARIANT (1)...(20): Xaa = Any Amino Acid
PGTXCGEXICAYAACXTXGC

SEQ ID NO: 2014 - protein, 20 aa, Artificial Sequence
  Synthetically generated peptide
  VARIANT (1)...(20): Xaa = Any Amino Acid
PGTXCGEXICAYAACXTGXC

SEQ ID NO: 2015 - protein, 20 aa, Artificial Sequence
  Synthetically generated peptide
  VARIANT (1)...(20): Xaa = Any Amino Acid
PGTXCGEXICAYAACXTGCX

SEQ ID NO: 2016 - protein, 19 aa, Artificial Sequence
  Synthetically generated peptide
  VARIANT (1)...(19): Xaa = Any Amino Acid
  VARIANT (1)...(19): Xaa = Any Amino Acid
PGTXCGEXICAYAACTXGC

SEQ ID NO: 2017 - protein, 20 aa, Artificial Sequence
  Synthetically generated peptide
  VARIANT (1)...(20): Xaa = Any Amino Acid
  VARIANT (1)...(20): Xaa = Any Amino Acid
PGTXCGEXICAYAACTXXGC

SEQ ID NO: 2018 - protein, 20 aa, Artificial Sequence
  Synthetically generated peptide
  VARIANT (1)...(20): Xaa = Any Amino Acid
  VARIANT (1)...(20): Xaa = Any Amino Acid
PGTXCGEXICAYAACTXGXC

SEQ ID NO: 2019 - protein, 20 aa, Artificial Sequence
  Synthetically generated peptide
  VARIANT (1)...(20): Xaa = Any Amino Acid
  VARIANT (1)...(20): Xaa = Any Amino Acid
PGTXCGEXICAYAACTXGCX

SEQ ID NO: 2020 - protein, 19 aa, Artificial Sequence
  Synthetically generated peptide
  VARIANT (1)...(19): Xaa = Any Amino Acid
  VARIANT (1)...(19): Xaa = Any Amino Acid
PGTXCGEXICAYAACTGXC

SEQ ID NO: 2021 - protein, 20 aa, Artificial Sequence
  Synthetically generated peptide
  VARIANT (1)...(20): Xaa = Any Amino Acid
  VARIANT (1)...(20): Xaa = Any Amino Acid
PGTXCGEXICAYAACTGXXC

SEQ ID NO: 2022 - protein, 20 aa, Artificial Sequence
  Synthetically generated peptide
  VARIANT (1)...(20): Xaa = Any Amino Acid
  VARIANT (1)...(20): Xaa = Any Amino Acid
PGTXCGEXICAYAACTGXCX

SEQ ID NO: 2023 - protein, 19 aa, Artificial Sequence
  Synthetically generated peptide
  VARIANT (1)...(19): Xaa = Any Amino Acid
  VARIANT (1)...(19): Xaa = Any Amino Acid
PGTXCGEXICAYAACTGCX

SEQ ID NO: 2024 - protein, 20 aa, Artificial Sequence
  Synthetically generated peptide
  VARIANT (1)...(20): Xaa = Any Amino Acid
  VARIANT (1)...(20): Xaa = Any Amino Acid
PGTXCGEXICAYAACTGCXX

SEQ ID NO: 2025 - protein, 18 aa, Artificial Sequence
  Synthetically generated peptide
  VARIANT (1)...(18): Xaa = Any Amino Acid
  VARIANT (1)...(18): Xaa = Any Amino Acid
PGTXCGEIXCAYAACTGC

SEQ ID NO: 2026 - protein, 19 aa, Artificial Sequence
  Synthetically generated peptide
  VARIANT (1)...(19): Xaa = Any Amino Acid
  VARIANT (1)...(19): Xaa = Any Amino Acid
PGTXCGEIXXCAYAACTGC

SEQ ID NO: 2027 - protein, 20 aa, Artificial Sequence
  Synthetically generated peptide
  VARIANT (1)...(20): Xaa = Any Amino Acid
  VARIANT (1)...(20): Xaa = Any Amino Acid
PGTXCGEIXXXCAYAACTGC

SEQ ID NO: 2028 - protein, 20 aa, Artificial Sequence
  Synthetically generated peptide
  VARIANT (1)...(20): Xaa = Any Amino Acid
  VARIANT (1)...(20): Xaa = Any Amino Acid
PGTXCGEIXXCXAYAACTGC

SEQ ID NO: 2029 - protein, 20 aa, Artificial Sequence
  Synthetically generated peptide
  VARIANT (1)...(20): Xaa = Any Amino Acid
  VARIANT (1)...(20): Xaa = Any Amino Acid
PGTXCGEIXXCAXYAACTGC

SEQ ID NO: 2030 - protein, 20 aa, Artificial Sequence
  Synthetically generated peptide
  VARIANT (1)...(20): Xaa = Any Amino Acid
  VARIANT (1)...(20): Xaa = Any Amino Acid
PGTXCGEIXXCAYXAACTGC

SEQ ID NO: 2031 - protein, 20 aa, Artificial Sequence
  Synthetically generated peptide
  VARIANT (1)...(20): Xaa = Any Amino Acid
  VARIANT (1)...(20): Xaa = Any Amino Acid
PGTXCGEIXXCAYAXACTGC

SEQ ID NO: 2032 - protein, 20 aa, Artificial Sequence
  Synthetically generated peptide
  VARIANT (1)...(20): Xaa = Any Amino Acid
  VARIANT (1)...(20): Xaa = Any Amino Acid
PGTXCGEIXXCAYAAXCTGC

SEQ ID NO: 2033 - protein, 20 aa, Artificial Sequence
  Synthetically generated peptide
  VARIANT (1)...(20): Xaa = Any Amino Acid
  VARIANT (1)...(20): Xaa = Any Amino Acid
PGTXCGEIXXCAYAACXTGC

SEQ ID NO: 2034 - protein, 20 aa, Artificial Sequence
  Synthetically generated peptide
  VARIANT (1)...(20): Xaa = Any Amino Acid
  VARIANT (1)...(20): Xaa = Any Amino Acid
PGTXCGEIXXCAYAACTXGC

SEQ ID NO: 2035 - protein, 20 aa, Artificial Sequence
  Synthetically generated peptide
  VARIANT (1)...(20): Xaa = Any Amino Acid
  VARIANT (1)...(20): Xaa = Any Amino Acid
PGTXCGEIXXCAYAACTGXC

SEQ ID NO: 2036 - protein, 20 aa, Artificial Sequence
  Synthetically generated peptide
  VARIANT (1)...(20): Xaa = Any Amino Acid
  VARIANT (1)...(20): Xaa = Any Amino Acid
PGTXCGEIXXCAYAACTGCX

SEQ ID NO: 2037 - protein, 19 aa, Artificial Sequence
  Synthetically generated peptide
  VARIANT (1)...(19): Xaa = Any Amino Acid
  VARIANT (1)...(19): Xaa = Any Amino Acid
PGTXCGEIXCXAYAACTGC

SEQ ID NO: 2038 - protein, 20 aa, Artificial Sequence
  Synthetically generated peptide
  VARIANT (1)...(20): Xaa = Any Amino Acid
  VARIANT (1)...(20): Xaa = Any Amino Acid
PGTXCGEIXCXXAYAACTGC

SEQ ID NO: 2039 - protein, 20 aa, Artificial Sequence
  Synthetically generated peptide
  VARIANT (1)...(20): Xaa = Any Amino Acid
  VARIANT (1)...(20): Xaa = Any Amino Acid
PGTXCGEIXCXAXYAACTGC

SEQ ID NO: 2040 - protein, 20 aa, Artificial Sequence
  Synthetically generated peptide
  VARIANT (1)...(20): Xaa = Any Amino Acid
  VARIANT (1)...(20): Xaa = Any Amino Acid
PGTXCGEIXCXAYXAACTGC

SEQ ID NO: 2041 - protein, 20 aa, Artificial Sequence
  Synthetically generated peptide
  VARIANT (1)...(20): Xaa = Any Amino Acid
  VARIANT (1)...(20): Xaa = Any Amino Acid
PGTXCGEIXCXAYAXACTGC

SEQ ID NO: 2042 - protein, 20 aa, Artificial Sequence
  Synthetically generated peptide
  VARIANT (1)...(20): Xaa = Any Amino Acid
  VARIANT (1)...(20): Xaa = Any Amino Acid
PGTXCGEIXCXAYAAXCTGC

SEQ ID NO: 2043 - protein, 20 aa, Artificial Sequence
  Synthetically generated peptide
  VARIANT (1)...(20): Xaa = Any Amino Acid
  VARIANT (1)...(20): Xaa = Any Amino Acid
PGTXCGEIXCXAYAACXTGC

SEQ ID NO: 2044 - protein, 20 aa, Artificial Sequence
  Synthetically generated peptide
  VARIANT (1)...(20): Xaa = Any Amino Acid
  VARIANT (1)...(20): Xaa = Any Amino Acid
PGTXCGEIXCXAYAACTXGC

SEQ ID NO: 2045 - protein, 20 aa, Artificial Sequence
  Synthetically generated peptide
  VARIANT (1)...(20): Xaa = Any Amino Acid
  VARIANT (1)...(20): Xaa = Any Amino Acid
PGTXCGEIXCXAYAACTGXC

SEQ ID NO: 2046 - protein, 20 aa, Artificial Sequence
  Synthetically generated peptide
  VARIANT (1)...(20): Xaa = Any Amino Acid
  VARIANT (1)...(20): Xaa = Any Amino Acid
PGTXCGEIXCXAYAACTGCX

SEQ ID NO: 2047 - protein, 19 aa, Artificial Sequence
  Synthetically generated peptide
  VARIANT (1)...(19): Xaa = Any Amino Acid
  VARIANT (1)...(19): Xaa = Any Amino Acid
PGTXCGEIXCAXYAACTGC

SEQ ID NO: 2048 - protein, 20 aa, Artificial Sequence
  Synthetically generated peptide
  VARIANT (1)...(20): Xaa = Any Amino Acid
  VARIANT (1)...(20): Xaa = Any Amino Acid
PGTXCGEIXCAXXYAACTGC

SEQ ID NO: 2049 - protein, 20 aa, Artificial Sequence
  Synthetically generated peptide
  VARIANT (1)...(20): Xaa = Any Amino Acid
  VARIANT (1)...(20): Xaa = Any Amino Acid
PGTXCGEIXCAXYXAACTGC

SEQ ID NO: 2050 - protein, 20 aa, Artificial Sequence
  Synthetically generated peptide
  VARIANT (1)...(20): Xaa = Any Amino Acid
  VARIANT (1)...(20): Xaa = Any Amino Acid
PGTXCGEIXCAXYAXACTGC

SEQ ID NO: 2051 - protein, 20 aa, Artificial Sequence
  Synthetically generated peptide
  VARIANT (1)...(20): Xaa = Any Amino Acid
  VARIANT (1)...(20): Xaa = Any Amino Acid
PGTXCGEIXCAXYAAXCTGC

SEQ ID NO: 2052 - protein, 20 aa, Artificial Sequence
  Synthetically generated peptide
  VARIANT (1)...(20): Xaa = Any Amino Acid
  VARIANT (1)...(20): Xaa = Any Amino Acid
PGTXCGEIXCAXYAACXTGC

SEQ ID NO: 2053 - protein, 20 aa, Artificial Sequence
  Synthetically generated peptide
  VARIANT (1)...(20): Xaa = Any Amino Acid
  VARIANT (1)...(20): Xaa = Any Amino Acid
PGTXCGEIXCAXYAACTXGC

SEQ ID NO: 2054 - protein, 20 aa, Artificial Sequence
  Synthetically generated peptide
  VARIANT (1)...(20): Xaa = Any Amino Acid
  VARIANT (1)...(20): Xaa = Any Amino Acid
PGTXCGEIXCAXYAACTGXC

SEQ ID NO: 2055 - protein, 20 aa, Artificial Sequence
  Synthetically generated peptide
  VARIANT (1)...(20): Xaa = Any Amino Acid
  VARIANT (1)...(20): Xaa = Any Amino Acid
PGTXCGEIXCAXYAACTGCX

SEQ ID NO: 2056 - protein, 19 aa, Artificial Sequence
  Synthetically generated peptide
  VARIANT (1)...(19): Xaa = Any Amino Acid
  VARIANT (1)...(19): Xaa = Any Amino Acid
PGTXCGEIXCAYXAACTGC

SEQ ID NO: 2057 - protein, 20 aa, Artificial Sequence
  Synthetically generated peptide
  VARIANT (1)...(20): Xaa = Any Amino Acid
  VARIANT (1)...(20): Xaa = Any Amino Acid
PGTXCGEIXCAYXXAACTGC

SEQ ID NO: 2058 - protein, 20 aa, Artificial Sequence
  Synthetically generated peptide
  VARIANT (1)...(20): Xaa = Any Amino Acid
  VARIANT (1)...(20): Xaa = Any Amino Acid
PGTXCGEIXCAYXAXACTGC

SEQ ID NO: 2059 - protein, 20 aa, Artificial Sequence
  Synthetically generated peptide
  VARIANT (1)...(20): Xaa = Any Amino Acid
  VARIANT (1)...(20): Xaa = Any Amino Acid
PGTXCGEIXCAYXAAXCTGC

SEQ ID NO: 2060 - protein, 20 aa, Artificial Sequence
  Synthetically generated peptide
  VARIANT (1)...(20): Xaa = Any Amino Acid
  VARIANT (1)...(20): Xaa = Any Amino Acid
PGTXCGEIXCAYXAACXTGC

SEQ ID NO: 2061 - protein, 20 aa, Artificial Sequence
  Synthetically generated peptide
  VARIANT (1)...(20): Xaa = Any Amino Acid
  VARIANT (1)...(20): Xaa = Any Amino Acid
PGTXCGEIXCAYXAACTXGC

SEQ ID NO: 2062 - protein, 20 aa, Artificial Sequence
  Synthetically generated peptide
  VARIANT (1)...(20): Xaa = Any Amino Acid
  VARIANT (1)...(20): Xaa = Any Amino Acid
PGTXCGEIXCAYXAACTGXC

SEQ ID NO: 2063 - protein, 20 aa, Artificial Sequence
  Synthetically generated peptide
  VARIANT (1)...(20): Xaa = Any Amino Acid
  VARIANT (1)...(20): Xaa = Any Amino Acid
PGTXCGEIXCAYXAACTGCX

SEQ ID NO: 2064 - protein, 19 aa, Artificial Sequence
  Synthetically generated peptide
  VARIANT (1)...(19): Xaa = Any Amino Acid
  VARIANT (1)...(19): Xaa = Any Amino Acid
PGTXCGEIXCAYAXACTGC

SEQ ID NO: 2065 - protein, 20 aa, Artificial Sequence
  Synthetically generated peptide
  VARIANT (1)...(20): Xaa = Any Amino Acid
  VARIANT (1)...(20): Xaa = Any Amino Acid
PGTXCGEIXCAYAXXACTGC

SEQ ID NO: 2066 - protein, 20 aa, Artificial Sequence
  Synthetically generated peptide
  VARIANT (1)...(20): Xaa = Any Amino Acid
  VARIANT (1)...(20): Xaa = Any Amino Acid
PGTXCGEIXCAYAXAXCTGC

SEQ ID NO: 2067 - protein, 20 aa, Artificial Sequence
  Synthetically generated peptide
  VARIANT (1)...(20): Xaa = Any Amino Acid
  VARIANT (1)...(20): Xaa = Any Amino Acid
PGTXCGEIXCAYAXACXTGC

SEQ ID NO: 2068 - protein, 20 aa, Artificial Sequence
  Synthetically generated peptide
  VARIANT (1)...(20): Xaa = Any Amino Acid
  VARIANT (1)...(20): Xaa = Any Amino Acid
PGTXCGEIXCAYAXACTXGC

SEQ ID NO: 2069 - protein, 20 aa, Artificial Sequence
  Synthetically generated peptide
  VARIANT (1)...(20): Xaa = Any Amino Acid
PGTXCGEIXCAYAXACTGXC

SEQ ID NO: 2070 - protein, 20 aa, Artificial Sequence
  Synthetically generated peptide
  VARIANT (1)...(20): Xaa = Any Amino Acid
PGTXCGEIXCAYAXACTGCX

SEQ ID NO: 2071 - protein, 19 aa, Artificial Sequence
  Synthetically generated peptide
  VARIANT (1)...(19): Xaa = Any Amino Acid
PGTXCGEIXCAYAAXCTGC

SEQ ID NO: 2072 - protein, 20 aa, Artificial Sequence
  Synthetically generated peptide
  VARIANT (1)...(20): Xaa = Any Amino Acid
PGTXCGEIXCAYAAXXCTGC

SEQ ID NO: 2073 - protein, 20 aa, Artificial Sequence
  Synthetically generated peptide
  VARIANT (1)...(20): Xaa = Any Amino Acid
PGTXCGEIXCAYAAXCXTGC

SEQ ID NO: 2074 - protein, 20 aa, Artificial Sequence
  Synthetically generated peptide
  VARIANT (1)...(20): Xaa = Any Amino Acid
PGTXCGEIXCAYAAXCTXGC

SEQ ID NO: 2075 - protein, 20 aa, Artificial Sequence
  Synthetically generated peptide
  VARIANT (1)...(20): Xaa = Any Amino Acid
PGTXCGEIXCAYAAXCTGXC

SEQ ID NO: 2076 - protein, 20 aa, Artificial Sequence
  Synthetically generated peptide
  VARIANT (1)...(20): Xaa = Any Amino Acid
PGTXCGEIXCAYAAXCTGCX

SEQ ID NO: 2077 - protein, 19 aa, Artificial Sequence
  Synthetically generated peptide
  VARIANT (1)...(19): Xaa = Any Amino Acid
PGTXCGEIXCAYAACXTGC

SEQ ID NO: 2078 - protein, 20 aa, Artificial Sequence
  Synthetically generated peptide
  VARIANT (1)...(20): Xaa = Any Amino Acid
PGTXCGEIXCAYAACXXTGC

SEQ ID NO: 2079 - protein, 20 aa, Artificial Sequence
  Synthetically generated peptide
  VARIANT (1)...(20): Xaa = Any Amino Acid
PGTXCGEIXCAYAACXTXGC

SEQ ID NO: 2080 - protein, 20 aa, Artificial Sequence
  Synthetically generated peptide
  VARIANT (1)...(20): Xaa = Any Amino Acid
PGTXCGEIXCAYAACXTGXC

SEQ ID NO: 2081 - protein, 20 aa, Artificial Sequence
  Synthetically generated peptide
  VARIANT (1)...(20): Xaa = Any Amino Acid
PGTXCGEIXCAYAACXTGCX

SEQ ID NO: 2082 - protein, 19 aa, Artificial Sequence
  Synthetically generated peptide
  VARIANT (1)...(19): Xaa = Any Amino Acid
PGTXCGEIXCAYAACTXGC

SEQ ID NO: 2083 - protein, 20 aa, Artificial Sequence
  Synthetically generated peptide
  VARIANT (1)...(20): Xaa = Any Amino Acid
PGTXCGEIXCAYAACTXXGC

SEQ ID NO: 2084 - protein, 20 aa, Artificial Sequence
  Synthetically generated peptide
  VARIANT (1)...(20): Xaa = Any Amino Acid
PGTXCGEIXCAYAACTXGXC

SEQ ID NO: 2085 - protein, 20 aa, Artificial Sequence
  Synthetically generated peptide
  VARIANT (1)...(20): Xaa = Any Amino Acid
PGTXCGEIXCAYAACTXGCX

SEQ ID NO: 2086 - protein, 19 aa, Artificial Sequence
  Synthetically generated peptide
  VARIANT (1)...(19): Xaa = Any Amino Acid
PGTXCGEIXCAYAACTGXC

SEQ ID NO: 2087 - protein, 20 aa, Artificial Sequence
  Synthetically generated peptide
  VARIANT (1)...(20): Xaa = Any Amino Acid
PGTXCGEIXCAYAACTGXXC

SEQ ID NO: 2088 - protein, 20 aa, Artificial Sequence
  Synthetically generated peptide
  VARIANT (1)...(20): Xaa = Any Amino Acid
PGTXCGEIXCAYAACTGXCX

SEQ ID NO: 2089 - protein, 19 aa, Artificial Sequence
  Synthetically generated peptide
  VARIANT (1)...(19): Xaa = Any Amino Acid
PGTXCGEIXCAYAACTGCX

SEQ ID NO: 2090 - protein, 20 aa, Artificial Sequence
  Synthetically generated peptide
  VARIANT (1)...(20): Xaa = Any Amino Acid
PGTXCGEIXCAYAACTGCXX

SEQ ID NO: 2091 - protein, 18 aa, Artificial Sequence
  Synthetically generated peptide
  VARIANT (1)...(18): Xaa = Any Amino Acid
PGTXCGEICXAYAACTGC

SEQ ID NO: 2092 - protein, 19 aa, Artificial Sequence
  Synthetically generated peptide
  VARIANT (1)...(19): Xaa = Any Amino Acid
PGTXCGEICXXAYAACTGC

SEQ ID NO: 2093 - protein, 20 aa, Artificial Sequence
  Synthetically generated peptide
  VARIANT (1)...(20): Xaa = Any Amino Acid
PGTXCGEICXXXAYAACTGC

SEQ ID NO: 2094 - protein, 20 aa, Artificial Sequence
  Synthetically generated peptide
  VARIANT (1)...(20): Xaa = Any Amino Acid
PGTXCGEICXXAXYAACTGC

SEQ ID NO: 2095 - protein, 20 aa, Artificial Sequence
  Synthetically generated peptide
  VARIANT (1)...(20): Xaa = Any Amino Acid
PGTXCGEICXXAYXAACTGC

SEQ ID NO: 2096 - protein, 20 aa, Artificial Sequence
  Synthetically generated peptide
  VARIANT (1)...(20): Xaa = Any Amino Acid
PGTXCGEICXXAYAXACTGC

SEQ ID NO: 2097 - protein, 20 aa, Artificial Sequence
  Synthetically generated peptide
  VARIANT (1)...(20): Xaa = Any Amino Acid
PGTXCGEICXXAYAAXCTGC

SEQ ID NO: 2098 - protein, 20 aa, Artificial Sequence
  Synthetically generated peptide
  VARIANT (1)...(20): Xaa = Any Amino Acid
PGTXCGEICXXAYAACXTGC

SEQ ID NO: 2099 - protein, 20 aa, Artificial Sequence
  Synthetically generated peptide
  VARIANT (1)...(20): Xaa = Any Amino Acid
PGTXCGEICXXAYAACTXGC

SEQ ID NO: 2100 - protein, 20 aa, Artificial Sequence
  Synthetically generated peptide
  VARIANT (1)...(20): Xaa = Any Amino Acid
PGTXCGEICXXAYAACTGXC

SEQ ID NO: 2101 - protein, 20 aa, Artificial Sequence
  Synthetically generated peptide
  VARIANT (1)...(20): Xaa = Any Amino Acid
PGTXCGEICXXAYAACTGCX

SEQ ID NO: 2102 - protein, 19 aa, Artificial Sequence
  Synthetically generated peptide
  VARIANT (1)...(19): Xaa = Any Amino Acid
PGTXCGEICXAXYAACTGC

SEQ ID NO: 2103 - protein, 20 aa, Artificial Sequence
  Synthetically generated peptide
  VARIANT (1)...(20): Xaa = Any Amino Acid
PGTXCGEICXAXXYAACTGC

SEQ ID NO: 2104 - protein, 20 aa, Artificial Sequence
  Synthetically generated peptide
  VARIANT (1)...(20): Xaa = Any Amino Acid
PGTXCGEICXAXYXAACTGC

SEQ ID NO: 2105 - protein, 20 aa, Artificial Sequence
  Synthetically generated peptide
  VARIANT (1)...(20): Xaa = Any Amino Acid
PGTXCGEICXAXYAXACTGC

SEQ ID NO: 2106 - protein, 20 aa, Artificial Sequence
  Synthetically generated peptide
  VARIANT (1)...(20): Xaa = Any Amino Acid
PGTXCGEICXAXYAAXCTGC

SEQ ID NO: 2107 - protein, 20 aa, Artificial Sequence
  Synthetically generated peptide
  VARIANT (1)...(20): Xaa = Any Amino Acid
PGTXCGEICXAXYAACXTGC

SEQ ID NO: 2108 - protein, 20 aa, Artificial Sequence
  Synthetically generated peptide
  VARIANT (1)...(20): Xaa = Any Amino Acid
PGTXCGEICXAXYAACTXGC

SEQ ID NO: 2109 - protein, 20 aa, Artificial Sequence
  Synthetically generated peptide
  VARIANT (1)...(20): Xaa = Any Amino Acid
PGTXCGEICXAXYAACTGXC

SEQ ID NO: 2110 - protein, 20 aa, Artificial Sequence
  Synthetically generated peptide
  VARIANT (1)...(20): Xaa = Any Amino Acid
PGTXCGEICXAXYAACTGCX

SEQ ID NO: 2111 - protein, 19 aa, Artificial Sequence
  Synthetically generated peptide
  VARIANT (1)...(19): Xaa = Any Amino Acid
PGTXCGEICXAYXAACTGC

SEQ ID NO: 2112 - protein, 20 aa, Artificial Sequence
  Synthetically generated peptide
  VARIANT (1)...(20): Xaa = Any Amino Acid
PGTXCGEICXAYXXAACTGC

SEQ ID NO: 2113 - protein, 20 aa, Artificial Sequence
  Synthetically generated peptide
  VARIANT (1)...(20): Xaa = Any Amino Acid
PGTXCGEICXAYXAXACTGC

SEQ ID NO: 2114 - protein, 20 aa, Artificial Sequence
  Synthetically generated peptide
  VARIANT (1)...(20): Xaa = Any Amino Acid
PGTXCGEICXAYXAAXCTGC

SEQ ID NO: 2115 - protein, 20 aa, Artificial Sequence
  Synthetically generated peptide
  VARIANT (1)...(20): Xaa = Any Amino Acid
PGTXCGEICXAYXAACXTGC

SEQ ID NO: 2116 - protein, 20 aa, Artificial Sequence
  Synthetically generated peptide
  VARIANT (1)...(20): Xaa = Any Amino Acid
PGTXCGEICXAYXAACTXGC

SEQ ID NO: 2117 - protein, 20 aa, Artificial Sequence
  Synthetically generated peptide
  VARIANT (1)...(20): Xaa = Any Amino Acid
PGTXCGEICXAYXAACTGXC

SEQ ID NO: 2118 - protein, 20 aa, Artificial Sequence
  Synthetically generated peptide
  VARIANT (1)...(20): Xaa = Any Amino Acid
PGTXCGEICXAYXAACTGCX

SEQ ID NO: 2119 - protein, 19 aa, Artificial Sequence
  Synthetically generated peptide
  VARIANT (1)...(19): Xaa = Any Amino Acid
PGTXCGEICXAYAXACTGC

SEQ ID NO: 2120 - protein, 20 aa, Artificial Sequence
  Synthetically generated peptide
  VARIANT (1)...(20): Xaa = Any Amino Acid
PGTXCGEICXAYAXXACTGC

SEQ ID NO: 2121 - protein, 20 aa, Artificial Sequence
  Synthetically generated peptide
  VARIANT (1)...(20): Xaa = Any Amino Acid
PGTXCGEICXAYAXAXCTGC

SEQ ID NO: 2122 - protein, 20 aa, Artificial Sequence
  Synthetically generated peptide
  VARIANT (1)...(20): Xaa = Any Amino Acid
PGTXCGEICXAYAXACXTGC

SEQ ID NO: 2123 - protein, 20 aa, Artificial Sequence
  Synthetically generated peptide
  VARIANT (1)...(20): Xaa = Any Amino Acid
PGTXCGEICXAYAXACTXGC

SEQ ID NO: 2124 - protein, 20 aa, Artificial Sequence
  Synthetically generated peptide
  VARIANT (1)...(20): Xaa = Any Amino Acid
PGTXCGEICXAYAXACTGXC

SEQ ID NO: 2125 - protein, 20 aa, Artificial Sequence
  Synthetically generated peptide
  VARIANT (1)...(20): Xaa = Any Amino Acid
PGTXCGEICXAYAXACTGCX

SEQ ID NO: 2126 - protein, 19 aa, Artificial Sequence
  Synthetically generated peptide
  VARIANT (1)...(19): Xaa = Any Amino Acid
PGTXCGEICXAYAAXCTGC

SEQ ID NO: 2127 - protein, 20 aa, Artificial Sequence
  Synthetically generated peptide
  VARIANT (1)...(20): Xaa = Any Amino Acid
PGTXCGEICXAYAAXXCTGC

SEQ ID NO: 2128 - protein, 20 aa, Artificial Sequence
  Synthetically generated peptide
  VARIANT (1)...(20): Xaa = Any Amino Acid
PGTXCGEICXAYAAXCXTGC

SEQ ID NO: 2129 - protein, 20 aa, Artificial Sequence
  Synthetically generated peptide
  VARIANT (1)...(20): Xaa = Any Amino Acid
PGTXCGEICXAYAAXCTXGC

SEQ ID NO: 2130 - protein, 20 aa, Artificial Sequence
  Synthetically generated peptide
  VARIANT (1)...(20): Xaa = Any Amino Acid
PGTXCGEICXAYAAXCTGXC

SEQ ID NO: 2131 - protein, 20 aa, Artificial Sequence
  Synthetically generated peptide
  VARIANT (1)...(20): Xaa = Any Amino Acid
PGTXCGEICXAYAAXCTGCX

SEQ ID NO: 2132 - protein, 19 aa, Artificial Sequence
  Synthetically generated peptide
  VARIANT (1)...(19): Xaa = Any Amino Acid
PGTXCGEICXAYAACXTGC

SEQ ID NO: 2133 - protein, 20 aa, Artificial Sequence
  Synthetically generated peptide
  VARIANT (1)...(20): Xaa = Any Amino Acid
PGTXCGEICXAYAACXXTGC

SEQ ID NO: 2134 - protein, 20 aa, Artificial Sequence
  Synthetically generated peptide
  VARIANT (1)...(20): Xaa = Any Amino Acid
PGTXCGEICXAYAACXTXGC

SEQ ID NO: 2135 - protein, 20 aa, Artificial Sequence
  Synthetically generated peptide
  VARIANT (1)...(20): Xaa = Any Amino Acid
PGTXCGEICXAYAACXTGXC

SEQ ID NO: 2136 - protein, 20 aa, Artificial Sequence
  Synthetically generated peptide
  VARIANT (1)...(20): Xaa = Any Amino Acid
PGTXCGEICXAYAACXTGCX

SEQ ID NO: 2137 - protein, 19 aa, Artificial Sequence
  Synthetically generated peptide
  VARIANT (1)...(19): Xaa = Any Amino Acid
PGTXCGEICXAYAACTXGC

SEQ ID NO: 2138 - protein, 20 aa, Artificial Sequence
  Synthetically generated peptide
  VARIANT (1)...(20): Xaa = Any Amino Acid
PGTXCGEICXAYAACTXXGC

SEQ ID NO: 2139 - protein, 20 aa, Artificial Sequence
  Synthetically generated peptide
  VARIANT (1)...(20): Xaa = Any Amino Acid
PGTXCGEICXAYAACTXGXC

SEQ ID NO: 2140 - protein, 20 aa, Artificial Sequence
  Synthetically generated peptide
  VARIANT (1)...(20): Xaa = Any Amino Acid
PGTXCGEICXAYAACTXGCX

SEQ ID NO: 2141 - protein, 19 aa, Artificial Sequence
  Synthetically generated peptide
  VARIANT (1)...(19): Xaa = Any Amino Acid
PGTXCGEICXAYAACTGXC

SEQ ID NO: 2142 - protein, 20 aa, Artificial Sequence
  Synthetically generated peptide
  VARIANT (1)...(20): Xaa = Any Amino Acid
PGTXCGEICXAYAACTGXXC

SEQ ID NO: 2143 - protein, 20 aa, Artificial Sequence
  Synthetically generated peptide
  VARIANT (1)...(20): Xaa = Any Amino Acid
PGTXCGEICXAYAACTGXCX

SEQ ID NO: 2144 - protein, 19 aa, Artificial Sequence
  Synthetically generated peptide
  VARIANT (1)...(19): Xaa = Any Amino Acid
PGTXCGEICXAYAACTGCX

SEQ ID NO: 2145 - protein, 20 aa, Artificial Sequence
  Synthetically generated peptide
  VARIANT (1)...(20): Xaa = Any Amino Acid
PGTXCGEICXAYAACTGCXX

SEQ ID NO: 2146 - protein, 18 aa, Artificial Sequence
  Synthetically generated peptide
  VARIANT (1)...(18): Xaa = Any Amino Acid
PGTXCGEICAXYAACTGC

SEQ ID NO: 2147 - protein, 19 aa, Artificial Sequence
  Synthetically generated peptide
  VARIANT (1)...(19): Xaa = Any Amino Acid
PGTXCGEICAXXYAACTGC

SEQ ID NO: 2148 - protein, 20 aa, Artificial Sequence
  Synthetically generated peptide
  VARIANT (1)...(20): Xaa = Any Amino Acid
PGTXCGEICAXXXYAACTGC

SEQ ID NO: 2149 - protein, 20 aa, Artificial Sequence
  Synthetically generated peptide
  VARIANT (1)...(20): Xaa = Any Amino Acid
PGTXCGEICAXXYXAACTGC

SEQ ID NO: 2150 - protein, 20 aa, Artificial Sequence
  Synthetically generated peptide
  VARIANT (1)...(20): Xaa = Any Amino Acid
PGTXCGEICAXXYAXACTGC

SEQ ID NO: 2151 - protein, 20 aa, Artificial Sequence
  Synthetically generated peptide
  VARIANT (1)...(20): Xaa = Any Amino Acid
PGTXCGEICAXXYAAXCTGC

SEQ ID NO: 2152 - protein, 20 aa, Artificial Sequence
  Synthetically generated peptide
  VARIANT (1)...(20): Xaa = Any Amino Acid
PGTXCGEICAXXYAACXTGC

SEQ ID NO: 2153 - protein, 20 aa, Artificial Sequence
  Synthetically generated peptide
  VARIANT (1)...(20): Xaa = Any Amino Acid
PGTXCGEICAXXYAACTXGC

SEQ ID NO: 2154 - protein, 20 aa, Artificial Sequence
  Synthetically generated peptide
  VARIANT (1)...(20): Xaa = Any Amino Acid
PGTXCGEICAXXYAACTGXC

SEQ ID NO: 2155 - protein, 20 aa, Artificial Sequence
  Synthetically generated peptide
  VARIANT (1)...(20): Xaa = Any Amino Acid
PGTXCGEICAXXYAACTGCX

SEQ ID NO: 2156 - protein, 19 aa, Artificial Sequence
  Synthetically generated peptide
  VARIANT (1)...(19): Xaa = Any Amino Acid
PGTXCGEICAXYXAACTGC

SEQ ID NO: 2157 - protein, 20 aa, Artificial Sequence
  Synthetically generated peptide
  VARIANT (1)...(20): Xaa = Any Amino Acid
PGTXCGEICAXYXXAACTGC

SEQ ID NO: 2158 - protein, 20 aa, Artificial Sequence
  Synthetically generated peptide
  VARIANT (1)...(20): Xaa = Any Amino Acid
PGTXCGEICAXYXAXACTGC

SEQ ID NO: 2159 - protein, 20 aa, Artificial Sequence
  Synthetically generated peptide
  VARIANT (1)...(20): Xaa = Any Amino Acid
PGTXCGEICAXYXAAXCTGC

SEQ ID NO: 2160 - protein, 20 aa, Artificial Sequence
  Synthetically generated peptide
  VARIANT (1)...(20): Xaa = Any Amino Acid
PGTXCGEICAXYXAACXTGC

SEQ ID NO: 2161 - protein, 20 aa, Artificial Sequence
  Synthetically generated peptide
  VARIANT (1)...(20): Xaa = Any Amino Acid
PGTXCGEICAXYXAACTXGC

SEQ ID NO: 2162 - protein, 20 aa, Artificial Sequence
  Synthetically generated peptide
  VARIANT (1)...(20): Xaa = Any Amino Acid
PGTXCGEICAXYXAACTGXC

SEQ ID NO: 2163 - protein, 20 aa, Artificial Sequence
  Synthetically generated peptide
  VARIANT (1)...(20): Xaa = Any Amino Acid
PGTXCGEICAXYXAACTGCX

SEQ ID NO: 2164 - protein, 19 aa, Artificial Sequence
  Synthetically generated peptide
  VARIANT (1)...(19): Xaa = Any Amino Acid
PGTXCGEICAXYAXACTGC

SEQ ID NO: 2165 - protein, 20 aa, Artificial Sequence
  Synthetically generated peptide
  VARIANT (1)...(20): Xaa = Any Amino Acid
PGTXCGEICAXYAXXACTGC

SEQ ID NO: 2166 - protein, 20 aa, Artificial Sequence
  Synthetically generated peptide
  VARIANT (1)...(20): Xaa = Any Amino Acid
PGTXCGEICAXYAXAXCTGC

SEQ ID NO: 2167 - protein, 20 aa, Artificial Sequence
  Synthetically generated peptide
  VARIANT (1)...(20): Xaa = Any Amino Acid
PGTXCGEICAXYAXACXTGC

SEQ ID NO: 2168 - protein, 20 aa, Artificial Sequence
  Synthetically generated peptide
  VARIANT (1)...(20): Xaa = Any Amino Acid
PGTXCGEICAXYAXACTXGC

SEQ ID NO: 2169 - protein, 20 aa, Artificial Sequence
  Synthetically generated peptide
  VARIANT (1)...(20): Xaa = Any Amino Acid
PGTXCGEICAXYAXACTGXC

SEQ ID NO: 2170 - protein, 20 aa, Artificial Sequence
  Synthetically generated peptide
  VARIANT (1)...(20): Xaa = Any Amino Acid
PGTXCGEICAXYAXACTGCX

SEQ ID NO: 2171 - protein, 19 aa, Artificial Sequence
  Synthetically generated peptide
  VARIANT (1)...(19): Xaa = Any Amino Acid
PGTXCGEICAXYAAXCTGC

SEQ ID NO: 2172 - protein, 20 aa, Artificial Sequence
  Synthetically generated peptide
  VARIANT (1)...(20): Xaa = Any Amino Acid
PGTXCGEICAXYAAXXCTGC

SEQ ID NO: 2173 - protein, 20 aa, Artificial Sequence
  Synthetically generated peptide
  VARIANT (1)...(20): Xaa = Any Amino Acid
PGTXCGEICAXYAAXCXTGC

SEQ ID NO: 2174 - protein, 20 aa, Artificial Sequence
  Synthetically generated peptide
  VARIANT (1)...(20): Xaa = Any Amino Acid
PGTXCGEICAXYAAXCTXGC

SEQ ID NO: 2175 - protein, 20 aa, Artificial Sequence
  Synthetically generated peptide
  VARIANT (1)...(20): Xaa = Any Amino Acid
PGTXCGEICAXYAAXCTGXC

SEQ ID NO: 2176 - protein, 20 aa, Artificial Sequence
  Synthetically generated peptide
  VARIANT (1)...(20): Xaa = Any Amino Acid
PGTXCGEICAXYAAXCTGCX

SEQ ID NO: 2177 - protein, 19 aa, Artificial Sequence
  Synthetically generated peptide
  VARIANT (1)...(19): Xaa = Any Amino Acid
PGTXCGEICAXYAACXTGC

SEQ ID NO: 2178 - protein, 20 aa, Artificial Sequence
  Synthetically generated peptide
  VARIANT (1)...(20): Xaa = Any Amino Acid
PGTXCGEICAXYAACXXTGC

SEQ ID NO: 2179 - protein, 20 aa, Artificial Sequence
  Synthetically generated peptide
  VARIANT (1)...(20): Xaa = Any Amino Acid
PGTXCGEICAXYAACXTXGC

SEQ ID NO: 2180 - protein, 20 aa, Artificial Sequence
  Synthetically generated peptide
  VARIANT (1)...(20): Xaa = Any Amino Acid
PGTXCGEICAXYAACXTGXC

SEQ ID NO: 2181 - protein, 20 aa, Artificial Sequence
  Synthetically generated peptide
  VARIANT (1)...(20): Xaa = Any Amino Acid
PGTXCGEICAXYAACXTGCX

SEQ ID NO: 2182 - protein, 19 aa, Artificial Sequence
  Synthetically generated peptide
  VARIANT (1)...(19): Xaa = Any Amino Acid
PGTXCGEICAXYAACTXGC

SEQ ID NO: 2183 - protein, 20 aa, Artificial Sequence
  Synthetically generated peptide
  VARIANT (1)...(20): Xaa = Any Amino Acid
PGTXCGEICAXYAACTXXGC

SEQ ID NO: 2184 - protein, 20 aa, Artificial Sequence
  Synthetically generated peptide
  VARIANT (1)...(20): Xaa = Any Amino Acid
PGTXCGEICAXYAACTXGXC

SEQ ID NO: 2185 - protein, 20 aa, Artificial Sequence
  Synthetically generated peptide
  VARIANT (1)...(20): Xaa = Any Amino Acid
PGTXCGEICAXYAACTXGCX

SEQ ID NO: 2186 - protein, 19 aa, Artificial Sequence
  Synthetically generated peptide
  VARIANT (1)...(19): Xaa = Any Amino Acid
PGTXCGEICAXYAACTGXC

SEQ ID NO: 2187 - protein, 20 aa, Artificial Sequence
  Synthetically generated peptide
  VARIANT (1)...(20): Xaa = Any Amino Acid
PGTXCGEICAXYAACTGXXC

SEQ ID NO: 2188 - protein, 20 aa, Artificial Sequence
  Synthetically generated peptide
  VARIANT (1)...(20): Xaa = Any Amino Acid
PGTXCGEICAXYAACTGXCX

SEQ ID NO: 2189 - protein, 19 aa, Artificial Sequence
  Synthetically generated peptide
  VARIANT (1)...(19): Xaa = Any Amino Acid
PGTXCGEICAXYAACTGCX

SEQ ID NO: 2190 - protein, 20 aa, Artificial Sequence
  Synthetically generated peptide
  VARIANT (1)...(20): Xaa = Any Amino Acid
PGTXCGEICAXYAACTGCXX

SEQ ID NO: 2191 - protein, 18 aa, Artificial Sequence
  Synthetically generated peptide
  VARIANT (1)...(18): Xaa = Any Amino Acid
PGTXCGEICAYXAACTGC

SEQ ID NO: 2192 - protein, 19 aa, Artificial Sequence
  Synthetically generated peptide
  VARIANT (1)...(19): Xaa = Any Amino Acid
PGTXCGEICAYXXAACTGC

SEQ ID NO: 2193 - protein, 20 aa, Artificial Sequence
  Synthetically generated peptide
  VARIANT (1)...(20): Xaa = Any Amino Acid
PGTXCGEICAYXXXAACTGC

SEQ ID NO: 2194 - protein, 20 aa, Artificial Sequence
  Synthetically generated peptide
  VARIANT (1)...(20): Xaa = Any Amino Acid
PGTXCGEICAYXXAXACTGC

SEQ ID NO: 2195 - protein, 20 aa, Artificial Sequence
  Synthetically generated peptide
  VARIANT (1)...(20): Xaa = Any Amino Acid
PGTXCGEICAYXXAAXCTGC

SEQ ID NO: 2196 - protein, 20 aa, Artificial Sequence
  Synthetically generated peptide
  VARIANT (1)...(20): Xaa = Any Amino Acid
PGTXCGEICAYXXAACXTGC

SEQ ID NO: 2197 - protein, 20 aa, Artificial Sequence
  Synthetically generated peptide
  VARIANT (1)...(20): Xaa = Any Amino Acid
PGTXCGEICAYXXAACTXGC

SEQ ID NO: 2198 - protein, 20 aa, Artificial Sequence
  Synthetically generated peptide
  VARIANT (1)...(20): Xaa = Any Amino Acid
PGTXCGEICAYXXAACTGXC

SEQ ID NO: 2199 - protein, 20 aa, Artificial Sequence
  Synthetically generated peptide
  VARIANT (1)...(20): Xaa = Any Amino Acid
PGTXCGEICAYXXAACTGCX

SEQ ID NO: 2200 - protein, 19 aa, Artificial Sequence
  Synthetically generated peptide
  VARIANT (1)...(19): Xaa = Any Amino Acid
PGTXCGEICAYXAXACTGC

SEQ ID NO: 2201 - protein, 20 aa, Artificial Sequence
  Synthetically generated peptide
  VARIANT (1)...(20): Xaa = Any Amino Acid
PGTXCGEICAYXAXXACTGC

SEQ ID NO: 2202 - protein, 20 aa, Artificial Sequence
  Synthetically generated peptide
  VARIANT (1)...(20): Xaa = Any Amino Acid
PGTXCGEICAYXAXAXCTGC

SEQ ID NO: 2203 - protein, 20 aa, Artificial Sequence
  Synthetically generated peptide
  VARIANT (1)...(20): Xaa = Any Amino Acid
PGTXCGEICAYXAXACXTGC

SEQ ID NO: 2204 - protein, 20 aa, Artificial Sequence
  Synthetically generated peptide
  VARIANT (1)...(20): Xaa = Any Amino Acid
PGTXCGEICAYXAXACTXGC

SEQ ID NO: 2205 - protein, 20 aa, Artificial Sequence
  Synthetically generated peptide
  VARIANT (1)...(20): Xaa = Any Amino Acid
PGTXCGEICAYXAXACTGXC

SEQ ID NO: 2206 - protein, 20 aa, Artificial Sequence
  Synthetically generated peptide
  VARIANT (1)...(20): Xaa = Any Amino Acid
PGTXCGEICAYXAXACTGCX

SEQ ID NO: 2207 - protein, 19 aa, Artificial Sequence
  Synthetically generated peptide
  VARIANT (1)...(19): Xaa = Any Amino Acid
PGTXCGEICAYXAAXCTGC

SEQ ID NO: 2208 - protein, 20 aa, Artificial Sequence
  Synthetically generated peptide
  VARIANT (1)...(20): Xaa = Any Amino Acid
PGTXCGEICAYXAAXXCTGC

SEQ ID NO: 2209 - protein, 20 aa, Artificial Sequence
  Synthetically generated peptide
  VARIANT (1)...(20): Xaa = Any Amino Acid
PGTXCGEICAYXAAXCXTGC

SEQ ID NO: 2210 - protein, 20 aa, Artificial Sequence
  Synthetically generated peptide
  VARIANT (1)...(20): Xaa = Any Amino Acid
PGTXCGEICAYXAAXCTXGC

SEQ ID NO: 2211 - protein, 20 aa, Artificial Sequence
  Synthetically generated peptide
  VARIANT (1)...(20): Xaa = Any Amino Acid
PGTXCGEICAYXAAXCTGXC

SEQ ID NO: 2212 - protein, 20 aa, Artificial Sequence
  Synthetically generated peptide
  VARIANT (1)...(20): Xaa = Any Amino Acid
PGTXCGEICAYXAAXCTGCX

SEQ ID NO: 2213 - protein, 19 aa, Artificial Sequence
  Synthetically generated peptide
  VARIANT (1)...(19): Xaa = Any Amino Acid
PGTXCGEICAYXAACXTGC

SEQ ID NO: 2214 - protein, 20 aa, Artificial Sequence
  Synthetically generated peptide
  VARIANT (1)...(20): Xaa = Any Amino Acid
PGTXCGEICAYXAACXXTGC

SEQ ID NO: 2215 - protein, 20 aa, Artificial Sequence
  Synthetically generated peptide
  VARIANT (1)...(20): Xaa = Any Amino Acid
PGTXCGEICAYXAACXTXGC

SEQ ID NO: 2216 - protein, 20 aa, Artificial Sequence
  Synthetically generated peptide
  VARIANT (1)...(20): Xaa = Any Amino Acid
PGTXCGEICAYXAACXTGXC

SEQ ID NO: 2217 - protein, 20 aa, Artificial Sequence
  Synthetically generated peptide
  VARIANT (1)...(20): Xaa = Any Amino Acid
PGTXCGEICAYXAACXTGCX

SEQ ID NO: 2218 - protein, 19 aa, Artificial Sequence
  Synthetically generated peptide
  VARIANT (1)...(19): Xaa = Any Amino Acid
PGTXCGEICAYXAACTXGC

SEQ ID NO: 2219 - protein, 20 aa, Artificial Sequence
  Synthetically generated peptide
  VARIANT (1)...(20): Xaa = Any Amino Acid
PGTXCGEICAYXAACTXXGC

SEQ ID NO: 2220 - protein, 20 aa, Artificial Sequence
  Synthetically generated peptide
  VARIANT (1)...(20): Xaa = Any Amino Acid
PGTXCGEICAYXAACTXGXC

SEQ ID NO: 2221 - protein, 20 aa, Artificial Sequence
  Synthetically generated peptide
  VARIANT (1)...(20): Xaa = Any Amino Acid
PGTXCGEICAYXAACTXGCX

SEQ ID NO: 2222 - protein, 19 aa, Artificial Sequence
  Synthetically generated peptide
  VARIANT (1)...(19): Xaa = Any Amino Acid
PGTXCGEICAYXAACTGXC

SEQ ID NO: 2223 - protein, 20 aa, Artificial Sequence
  Synthetically generated peptide
  VARIANT (1)...(20): Xaa = Any Amino Acid
PGTXCGEICAYXAACTGXXC

SEQ ID NO: 2224 - protein, 20 aa, Artificial Sequence
  Synthetically generated peptide
  VARIANT (1)...(20): Xaa = Any Amino Acid
PGTXCGEICAYXAACTGXCX

SEQ ID NO: 2225 - protein, 19 aa, Artificial Sequence
  Synthetically generated peptide
  VARIANT (1)...(19): Xaa = Any Amino Acid
PGTXCGEICAYXAACTGCX

SEQ ID NO: 2226 - protein, 20 aa, Artificial Sequence
  Synthetically generated peptide
  VARIANT (1)...(20): Xaa = Any Amino Acid
PGTXCGEICAYXAACTGCXX

SEQ ID NO: 2227 - protein, 18 aa, Artificial Sequence
  Synthetically generated peptide
  VARIANT (1)...(18): Xaa = Any Amino Acid
PGTXCGEICAYAXACTGC

SEQ ID NO: 2228 - protein, 19 aa, Artificial Sequence
  Synthetically generated peptide
  VARIANT (1)...(19): Xaa = Any Amino Acid
PGTXCGEICAYAXXACTGC

SEQ ID NO: 2229 - protein, 20 aa, Artificial Sequence
  Synthetically generated peptide
  VARIANT (1)...(20): Xaa = Any Amino Acid
PGTXCGEICAYAXXXACTGC

SEQ ID NO: 2230 - protein, 20 aa, Artificial Sequence
  Synthetically generated peptide
  VARIANT (1)...(20): Xaa = Any Amino Acid
PGTXCGEICAYAXXAXCTGC

SEQ ID NO: 2231 - protein, 20 aa, Artificial Sequence
  Synthetically generated peptide
  VARIANT (1)...(20): Xaa = Any Amino Acid
PGTXCGEICAYAXXACXTGC

SEQ ID NO: 2232 - protein, 20 aa, Artificial Sequence
  Synthetically generated peptide
  VARIANT (1)...(20): Xaa = Any Amino Acid
PGTXCGEICAYAXXACTXGC

SEQ ID NO: 2233 - protein, 20 aa, Artificial Sequence
  Synthetically generated peptide
  VARIANT (1)...(20): Xaa = Any Amino Acid
PGTXCGEICAYAXXACTGXC

SEQ ID NO: 2234 - protein, 20 aa, Artificial Sequence
  Synthetically generated peptide
  VARIANT (1)...(20): Xaa = Any Amino Acid
PGTXCGEICAYAXXACTGCX

SEQ ID NO: 2235 - protein, 19 aa, Artificial Sequence
  Synthetically generated peptide
  VARIANT (1)...(19): Xaa = Any Amino Acid
PGTXCGEICAYAXAXCTGC

SEQ ID NO: 2236 - protein, 20 aa, Artificial Sequence
  Synthetically generated peptide
  VARIANT (1)...(20): Xaa = Any Amino Acid
PGTXCGEICAYAXAXXCTGC

SEQ ID NO: 2237 - protein, 20 aa, Artificial Sequence
  Synthetically generated peptide
  VARIANT (1)...(20): Xaa = Any Amino Acid
PGTXCGEICAYAXAXCXTGC

SEQ ID NO: 2238 - protein, 20 aa, Artificial Sequence
  Synthetically generated peptide
  VARIANT (1)...(20): Xaa = Any Amino Acid
PGTXCGEICAYAXAXCTXGC

SEQ ID NO: 2239 - protein, 20 aa, Artificial Sequence
  Synthetically generated peptide
  VARIANT (1)...(20): Xaa = Any Amino Acid
PGTXCGEICAYAXAXCTGXC

SEQ ID NO: 2240 - protein, 20 aa, Artificial Sequence
  Synthetically generated peptide
  VARIANT (1)...(20): Xaa = Any Amino Acid
PGTXCGEICAYAXAXCTGCX

SEQ ID NO: 2241 - protein, 19 aa, Artificial Sequence
  Synthetically generated peptide
  VARIANT (1)...(19): Xaa = Any Amino Acid
PGTXCGEICAYAXACXTGC

SEQ ID NO: 2242 - protein, 20 aa, Artificial Sequence
  Synthetically generated peptide
  VARIANT (1)...(20): Xaa = Any Amino Acid
PGTXCGEICAYAXACXXTGC

SEQ ID NO: 2243 - protein, 20 aa, Artificial Sequence
  Synthetically generated peptide
  VARIANT (1)...(20): Xaa = Any Amino Acid
PGTXCGEICAYAXACXTXGC

SEQ ID NO: 2244 - protein, 20 aa, Artificial Sequence
  Synthetically generated peptide
  VARIANT (1)...(20): Xaa = Any Amino Acid
PGTXCGEICAYAXACXTGXC

SEQ ID NO: 2245 - protein, 20 aa, Artificial Sequence
  Synthetically generated peptide
  VARIANT (1)...(20): Xaa = Any Amino Acid
PGTXCGEICAYAXACXTGCX

SEQ ID NO: 2246 - protein, 19 aa, Artificial Sequence
  Synthetically generated peptide
  VARIANT (1)...(19): Xaa = Any Amino Acid
PGTXCGEICAYAXACTXGC

SEQ ID NO: 2247 - protein, 20 aa, Artificial Sequence
  Synthetically generated peptide
  VARIANT (1)...(20): Xaa = Any Amino Acid
PGTXCGEICAYAXACTXXGC

SEQ ID NO: 2248 - protein, 20 aa, Artificial Sequence
  Synthetically generated peptide
  VARIANT (1)...(20): Xaa = Any Amino Acid
PGTXCGEICAYAXACTXGXC

SEQ ID NO: 2249 - protein, 20 aa, Artificial Sequence
  Synthetically generated peptide
  VARIANT (1)...(20): Xaa = Any Amino Acid
PGTXCGEICAYAXACTXGCX

SEQ ID NO: 2250 - protein, 19 aa, Artificial Sequence
  Synthetically generated peptide
  VARIANT (1)...(19): Xaa = Any Amino Acid
PGTXCGEICAYAXACTGXC

SEQ ID NO: 2251 - protein, 20 aa, Artificial Sequence
  Synthetically generated peptide
  VARIANT (1)...(20): Xaa = Any Amino Acid
PGTXCGEICAYAXACTGXXC

SEQ ID NO: 2252 - protein, 20 aa, Artificial Sequence
  Synthetically generated peptide
  VARIANT (1)...(20): Xaa = Any Amino Acid
PGTXCGEICAYAXACTGXCX

SEQ ID NO: 2253 - protein, 19 aa, Artificial Sequence
  Synthetically generated peptide
  VARIANT (1)...(19): Xaa = Any Amino Acid
PGTXCGEICAYAXACTGCX

SEQ ID NO: 2254 - protein, 20 aa, Artificial Sequence
  Synthetically generated peptide
  VARIANT (1)...(20): Xaa = Any Amino Acid
PGTXCGEICAYAXACTGCXX

SEQ ID NO: 2255 - protein, 18 aa, Artificial Sequence
  Synthetically generated peptide
  VARIANT (1)...(18): Xaa = Any Amino Acid
PGTXCGEICAYAAXCTGC

SEQ ID NO: 2256 - protein, 19 aa, Artificial Sequence
  Synthetically generated peptide
  VARIANT (1)...(19): Xaa = Any Amino Acid
PGTXCGEICAYAAXXCTGC

SEQ ID NO: 2257 - protein, 20 aa, Artificial Sequence
  Synthetically generated peptide
  VARIANT (1)...(20): Xaa = Any Amino Acid
PGTXCGEICAYAAXXXCTGC

SEQ ID NO: 2258 - protein, 20 aa, Artificial Sequence
  Synthetically generated peptide
  VARIANT (1)...(20): Xaa = Any Amino Acid
PGTXCGEICAYAAXXCXTGC

SEQ ID NO: 2259 - protein, 20 aa, Artificial Sequence
  Synthetically generated peptide
  VARIANT (1)...(20): Xaa = Any Amino Acid
PGTXCGEICAYAAXXCTXGC

SEQ ID NO: 2260 - protein, 20 aa, Artificial Sequence
  Synthetically generated peptide
  VARIANT (1)...(20): Xaa = Any Amino Acid
PGTXCGEICAYAAXXCTGXC

SEQ ID NO: 2261 - protein, 20 aa, Artificial Sequence
  Synthetically generated peptide
  VARIANT (1)...(20): Xaa = Any Amino Acid
PGTXCGEICAYAAXXCTGCX

SEQ ID NO: 2262 - protein, 19 aa, Artificial Sequence
  Synthetically generated peptide
  VARIANT (1)...(19): Xaa = Any Amino Acid
PGTXCGEICAYAAXCXTGC

SEQ ID NO: 2263 - protein, 20 aa, Artificial Sequence
  Synthetically generated peptide
  VARIANT (1)...(20): Xaa = Any Amino Acid
PGTXCGEICAYAAXCXXTGC

SEQ ID NO: 2264 - protein, 20 aa, Artificial Sequence
  Synthetically generated peptide
  VARIANT (1)...(20): Xaa = Any Amino Acid
PGTXCGEICAYAAXCXTXGC

SEQ ID NO: 2265 - protein, 20 aa, Artificial Sequence
  Synthetically generated peptide
  VARIANT (1)...(20): Xaa = Any Amino Acid
PGTXCGEICAYAAXCXTGXC

SEQ ID NO: 2266 - protein, 20 aa, Artificial Sequence
  Synthetically generated peptide
  VARIANT (1)...(20): Xaa = Any Amino Acid
PGTXCGEICAYAAXCXTGCX

SEQ ID NO: 2267 - protein, 19 aa, Artificial Sequence
  Synthetically generated peptide
  VARIANT (1)...(19): Xaa = Any Amino Acid
PGTXCGEICAYAAXCTXGC

SEQ ID NO: 2268 - protein, 20 aa, Artificial Sequence
  Synthetically generated peptide
  VARIANT (1)...(20): Xaa = Any Amino Acid
PGTXCGEICAYAAXCTXXGC

SEQ ID NO: 2269 - protein, 20 aa, Artificial Sequence
  Synthetically generated peptide
  VARIANT (1)...(20): Xaa = Any Amino Acid
PGTXCGEICAYAAXCTXGXC

SEQ ID NO: 2270 - protein, 20 aa, Artificial Sequence
  Synthetically generated peptide
  VARIANT (1)...(20): Xaa = Any Amino Acid
PGTXCGEICAYAAXCTXGCX

SEQ ID NO: 2271 - protein, 19 aa, Artificial Sequence
  Synthetically generated peptide
  VARIANT (1)...(19): Xaa = Any Amino Acid
PGTXCGEICAYAAXCTGXC

SEQ ID NO: 2272 - protein, 20 aa, Artificial Sequence
  Synthetically generated peptide
  VARIANT (1)...(20): Xaa = Any Amino Acid
PGTXCGEICAYAAXCTGXXC

SEQ ID NO: 2273 - protein, 20 aa, Artificial Sequence
  Synthetically generated peptide
  VARIANT (1)...(20): Xaa = Any Amino Acid
PGTXCGEICAYAAXCTGXCX

SEQ ID NO: 2274 - protein, 19 aa, Artificial Sequence
  Synthetically generated peptide
  VARIANT (1)...(19): Xaa = Any Amino Acid
PGTXCGEICAYAAXCTGCX

SEQ ID NO: 2275 - protein, 20 aa, Artificial Sequence
  Synthetically generated peptide
  VARIANT (1)...(20): Xaa = Any Amino Acid
PGTXCGEICAYAAXCTGCXX

SEQ ID NO: 2276 - protein, 18 aa, Artificial Sequence
  Synthetically generated peptide
  VARIANT (1)...(18): Xaa = Any Amino Acid
PGTXCGEICAYAACXTGC

SEQ ID NO: 2277 - protein, 19 aa, Artificial Sequence
  Synthetically generated peptide
  VARIANT (1)...(19): Xaa = Any Amino Acid
PGTXCGEICAYAACXXTGC

SEQ ID NO: 2278 - protein, 20 aa, Artificial Sequence
  Synthetically generated peptide
  VARIANT (1)...(20): Xaa = Any Amino Acid
PGTXCGEICAYAACXXXTGC

SEQ ID NO: 2279 - protein, 20 aa, Artificial Sequence
  Synthetically generated peptide
  VARIANT (1)...(20): Xaa = Any Amino Acid
PGTXCGEICAYAACXXTXGC

SEQ ID NO: 2280 - protein, 20 aa, Artificial Sequence
  Synthetically generated peptide
  VARIANT (1)...(20): Xaa = Any Amino Acid
PGTXCGEICAYAACXXTGXC

SEQ ID NO: 2281 - protein, 20 aa, Artificial Sequence
  Synthetically generated peptide
  VARIANT (1)...(20): Xaa = Any Amino Acid
PGTXCGEICAYAACXXTGCX

SEQ ID NO: 2282 - protein, 19 aa, Artificial Sequence
  Synthetically generated peptide
  VARIANT (1)...(19): Xaa = Any Amino Acid
PGTXCGEICAYAACXTXGC

SEQ ID NO: 2283 - protein, 20 aa, Artificial Sequence
  Synthetically generated peptide
  VARIANT (1)...(20): Xaa = Any Amino Acid
PGTXCGEICAYAACXTXXGC

SEQ ID NO: 2284 - protein, 20 aa, Artificial Sequence
  Synthetically generated peptide
  VARIANT (1)...(20): Xaa = Any Amino Acid
PGTXCGEICAYAACXTXGXC

SEQ ID NO: 2285 - protein, 20 aa, Artificial Sequence
  Synthetically generated peptide
  VARIANT (1)...(20): Xaa = Any Amino Acid
PGTXCGEICAYAACXTXGCX

SEQ ID NO: 2286 - protein, 19 aa, Artificial Sequence
  Synthetically generated peptide
  VARIANT (1)...(19): Xaa = Any Amino Acid
PGTXCGEICAYAACXTGXC

SEQ ID NO: 2287 - protein, 20 aa, Artificial Sequence
  Synthetically generated peptide
  VARIANT (1)...(20): Xaa = Any Amino Acid
PGTXCGEICAYAACXTGXXC

SEQ ID NO: 2288 - protein, 20 aa, Artificial Sequence
  Synthetically generated peptide
  VARIANT (1)...(20): Xaa = Any Amino Acid
PGTXCGEICAYAACXTGXCX

SEQ ID NO: 2289 - protein, 19 aa, Artificial Sequence
  Synthetically generated peptide
  VARIANT (1)...(19): Xaa = Any Amino Acid
PGTXCGEICAYAACXTGCX

SEQ ID NO: 2290 - protein, 20 aa, Artificial Sequence
  Synthetically generated peptide
  VARIANT (1)...(20): Xaa = Any Amino Acid
PGTXCGEICAYAACXTGCXX

SEQ ID NO: 2291 - protein, 18 aa, Artificial Sequence
  Synthetically generated peptide
  VARIANT (1)...(18): Xaa = Any Amino Acid
PGTXCGEICAYAACTXGC

SEQ ID NO: 2292 - protein, 19 aa, Artificial Sequence
  Synthetically generated peptide
  VARIANT (1)...(19): Xaa = Any Amino Acid
PGTXCGEICAYAACTXXGC

SEQ ID NO: 2293 - protein, 20 aa, Artificial Sequence
  Synthetically generated peptide
  VARIANT (1)...(20): Xaa = Any Amino Acid
PGTXCGEICAYAACTXXXGC

SEQ ID NO: 2294 - protein, 20 aa, Artificial Sequence
  Synthetically generated peptide
  VARIANT (1)...(20): Xaa = Any Amino Acid
PGTXCGEICAYAACTXXGXC

SEQ ID NO: 2295 - protein, 20 aa, Artificial Sequence
  Synthetically generated peptide
  VARIANT (1)...(20): Xaa = Any Amino Acid
PGTXCGEICAYAACTXXGCX

SEQ ID NO: 2296 - protein, 19 aa, Artificial Sequence
  Synthetically generated peptide
  VARIANT (1)...(19): Xaa = Any Amino Acid
PGTXCGEICAYAACTXGXC

SEQ ID NO: 2297 - protein, 20 aa, Artificial Sequence
  Synthetically generated peptide
  VARIANT (1)...(20): Xaa = Any Amino Acid
PGTXCGEICAYAACTXGXXC

SEQ ID NO: 2298 - protein, 20 aa, Artificial Sequence
  Synthetically generated peptide
  VARIANT (1)...(20): Xaa = Any Amino Acid
PGTXCGEICAYAACTXGXCX

SEQ ID NO: 2299 - protein, 19 aa, Artificial Sequence
  Synthetically generated peptide
  VARIANT (1)...(19): Xaa = Any Amino Acid
PGTXCGEICAYAACTXGCX

SEQ ID NO: 2300 - protein, 20 aa, Artificial Sequence
  Synthetically generated peptide
  VARIANT (1)...(20): Xaa = Any Amino Acid
PGTXCGEICAYAACTXGCXX

SEQ ID NO: 2301 - protein, 18 aa, Artificial Sequence
  Synthetically generated peptide
  VARIANT (1)...(18): Xaa = Any Amino Acid
PGTXCGEICAYAACTGXC

SEQ ID NO: 2302 - protein, 19 aa, Artificial Sequence
  Synthetically generated peptide
  VARIANT (1)...(19): Xaa = Any Amino Acid
PGTXCGEICAYAACTGXXC

SEQ ID NO: 2303 - protein, 20 aa, Artificial Sequence
  Synthetically generated peptide
  VARIANT (1)...(20): Xaa = Any Amino Acid
PGTXCGEICAYAACTGXXXC

SEQ ID NO: 2304 - protein, 20 aa, Artificial Sequence
  Synthetically generated peptide
  VARIANT (1)...(20): Xaa = Any Amino Acid
PGTXCGEICAYAACTGXXCX

SEQ ID NO: 2305 - protein, 19 aa, Artificial Sequence
  Synthetically generated peptide
  VARIANT (1)...(19): Xaa = Any Amino Acid
PGTXCGEICAYAACTGXCX

SEQ ID NO: 2306 - protein, 20 aa, Artificial Sequence
  Synthetically generated peptide
  VARIANT (1)...(20): Xaa = Any Amino Acid
PGTXCGEICAYAACTGXCXX

SEQ ID NO: 2307 - protein, 18 aa, Artificial Sequence
  Synthetically generated peptide
  VARIANT (1)...(18): Xaa = Any Amino Acid
PGTXCGEICAYAACTGCX

SEQ ID NO: 2308 - protein, 19 aa, Artificial Sequence
  Synthetically generated peptide
  VARIANT (1)...(19): Xaa = Any Amino Acid
PGTXCGEICAYAACTGCXX

SEQ ID NO: 2309 - protein, 20 aa, Artificial Sequence
  Synthetically generated peptide
  VARIANT (1)...(20): Xaa = Any Amino Acid
PGTXCGEICAYAACTGCXXX

SEQ ID NO: 2310 - protein, 17 aa, Artificial Sequence
  Synthetically generated peptide
  VARIANT (1)...(17): Xaa = Any Amino Acid
PGTCXGEICAYAACTGC

SEQ ID NO: 2311 - protein, 18 aa, Artificial Sequence
  Synthetically generated peptide
  VARIANT (1)...(18): Xaa = Any Amino Acid
PGTCXXGEICAYAACTGC

SEQ ID NO: 2312 - protein, 19 aa, Artificial Sequence
  Synthetically generated peptide
  VARIANT (1)...(19): Xaa = Any Amino Acid
PGTCXXXGEICAYAACTGC

SEQ ID NO: 2313 - protein, 20 aa, Artificial Sequence
  Synthetically generated peptide
  VARIANT (1)...(20): Xaa = Any Amino Acid
PGTCXXXXGEICAYAACTGC

SEQ ID NO: 2314 - protein, 20 aa, Artificial Sequence
  Synthetically generated peptide
  VARIANT (1)...(20): Xaa = Any Amino Acid
PGTCXXXGXEICAYAACTGC

SEQ ID NO: 2315 - protein, 20 aa, Artificial Sequence
  Synthetically generated peptide
  VARIANT (1)...(20): Xaa = Any Amino Acid
PGTCXXXGEXICAYAACTGC

SEQ ID NO: 2316 - protein, 20 aa, Artificial Sequence
  Synthetically generated peptide
  VARIANT (1)...(20): Xaa = Any Amino Acid
PGTCXXXGEIXCAYAACTGC

SEQ ID NO: 2317 - protein, 20 aa, Artificial Sequence
  Synthetically generated peptide
  VARIANT (1)...(20): Xaa = Any Amino Acid
PGTCXXXGEICXAYAACTGC

SEQ ID NO: 2318 - protein, 20 aa, Artificial Sequence
  Synthetically generated peptide
  VARIANT (1)...(20): Xaa = Any Amino Acid
PGTCXXXGEICAXYAACTGC

SEQ ID NO: 2319 - protein, 20 aa, Artificial Sequence
  Synthetically generated peptide
  VARIANT (1)...(20): Xaa = Any Amino Acid
PGTCXXXGEICAYXAACTGC

SEQ ID NO: 2320 - protein, 20 aa, Artificial Sequence
  Synthetically generated peptide
  VARIANT (1)...(20): Xaa = Any Amino Acid
PGTCXXXGEICAYAXACTGC

SEQ ID NO: 2321 - protein, 20 aa, Artificial Sequence
  Synthetically generated peptide
  VARIANT (1)...(20): Xaa = Any Amino Acid
PGTCXXXGEICAYAAXCTGC

SEQ ID NO: 2322 - protein, 20 aa, Artificial Sequence
  Synthetically generated peptide
  VARIANT (1)...(20): Xaa = Any Amino Acid
PGTCXXXGEICAYAACXTGC

SEQ ID NO: 2323 - protein, 20 aa, Artificial Sequence
  Synthetically generated peptide
  VARIANT (1)...(20): Xaa = Any Amino Acid
PGTCXXXGEICAYAACTXGC

SEQ ID NO: 2324 - protein, 20 aa, Artificial Sequence
  Synthetically generated peptide
  VARIANT (1)...(20): Xaa = Any Amino Acid
PGTCXXXGEICAYAACTGXC

SEQ ID NO: 2325 - protein, 20 aa, Artificial Sequence
  Synthetically generated peptide
  VARIANT (1)...(20): Xaa = Any Amino Acid
PGTCXXXGEICAYAACTGCX

SEQ ID NO: 2326 - protein, 19 aa, Artificial Sequence
  Synthetically generated peptide
  VARIANT (1)...(19): Xaa = Any Amino Acid
PGTCXXGXEICAYAACTGC

SEQ ID NO: 2327 - protein, 20 aa, Artificial Sequence
  Synthetically generated peptide
  VARIANT (1)...(20): Xaa = Any Amino Acid
PGTCXXGXXEICAYAACTGC

SEQ ID NO: 2328 - protein, 20 aa, Artificial Sequence
  Synthetically generated peptide
  VARIANT (1)...(20): Xaa = Any Amino Acid
PGTCXXGXEXICAYAACTGC

SEQ ID NO: 2329 - protein, 20 aa, Artificial Sequence
  Synthetically generated peptide
  VARIANT (1)...(20): Xaa = Any Amino Acid
PGTCXXGXEIXCAYAACTGC

SEQ ID NO: 2330 - protein, 20 aa, Artificial Sequence
  Synthetically generated peptide
  VARIANT (1)...(20): Xaa = Any Amino Acid
PGTCXXGXEICXAYAACTGC

SEQ ID NO: 2331 - protein, 20 aa, Artificial Sequence
  Synthetically generated peptide
  VARIANT (1)...(20): Xaa = Any Amino Acid
PGTCXXGXEICAXYAACTGC

SEQ ID NO: 2332 - protein, 20 aa, Artificial Sequence
  Synthetically generated peptide
  VARIANT (1)...(20): Xaa = Any Amino Acid
PGTCXXGXEICAYXAACTGC

SEQ ID NO: 2333 - protein, 20 aa, Artificial Sequence
  Synthetically generated peptide
  VARIANT (1)...(20): Xaa = Any Amino Acid
PGTCXXGXEICAYAXACTGC

SEQ ID NO: 2334 - protein, 20 aa, Artificial Sequence
  Synthetically generated peptide
  VARIANT (1)...(20): Xaa = Any Amino Acid
PGTCXXGXEICAYAAXCTGC

SEQ ID NO: 2335 - protein, 20 aa, Artificial Sequence
  Synthetically generated peptide
  VARIANT (1)...(20): Xaa = Any Amino Acid
PGTCXXGXEICAYAACXTGC

SEQ ID NO: 2336 - protein, 20 aa, Artificial Sequence
  Synthetically generated peptide
  VARIANT (1)...(20): Xaa = Any Amino Acid
PGTCXXGXEICAYAACTXGC

SEQ ID NO: 2337 - protein, 20 aa, Artificial Sequence
  Synthetically generated peptide
  VARIANT (1)...(20): Xaa = Any Amino Acid
PGTCXXGXEICAYAACTGXC

SEQ ID NO: 2338 - protein, 20 aa, Artificial Sequence
  Synthetically generated peptide
  VARIANT (1)...(20): Xaa = Any Amino Acid
PGTCXXGXEICAYAACTGCX

SEQ ID NO: 2339 - protein, 19 aa, Artificial Sequence
  Synthetically generated peptide
  VARIANT (1)...(19): Xaa = Any Amino Acid
PGTCXXGEXICAYAACTGC

SEQ ID NO: 2340 - protein, 20 aa, Artificial Sequence
  Synthetically generated peptide
  VARIANT (1)...(20): Xaa = Any Amino Acid
PGTCXXGEXXICAYAACTGC

SEQ ID NO: 2341 - protein, 20 aa, Artificial Sequence
  Synthetically generated peptide
  VARIANT (1)...(20): Xaa = Any Amino Acid
PGTCXXGEXIXCAYAACTGC

SEQ ID NO: 2342 - protein, 20 aa, Artificial Sequence
  Synthetically generated peptide
  VARIANT (1)...(20): Xaa = Any Amino Acid
PGTCXXGEXICXAYAACTGC

SEQ ID NO: 2343 - protein, 20 aa, Artificial Sequence
  Synthetically generated peptide
  VARIANT (1)...(20): Xaa = Any Amino Acid
PGTCXXGEXICAXYAACTGC

SEQ ID NO: 2344 - protein, 20 aa, Artificial Sequence
  Synthetically generated peptide
  VARIANT (1)...(20): Xaa = Any Amino Acid
PGTCXXGEXICAYXAACTGC

SEQ ID NO: 2345 - protein, 20 aa, Artificial Sequence
  Synthetically generated peptide
  VARIANT (1)...(20): Xaa = Any Amino Acid
PGTCXXGEXICAYAXACTGC

SEQ ID NO: 2346 - protein, 20 aa, Artificial Sequence
  Synthetically generated peptide
  VARIANT (1)...(20): Xaa = Any Amino Acid
PGTCXXGEXICAYAAXCTGC

SEQ ID NO: 2347 - protein, 20 aa, Artificial Sequence
  Synthetically generated peptide
  VARIANT (1)...(20): Xaa = Any Amino Acid
PGTCXXGEXICAYAACXTGC

SEQ ID NO: 2348 - protein, 20 aa, Artificial Sequence
  Synthetically generated peptide
  VARIANT (1)...(20): Xaa = Any Amino Acid
PGTCXXGEXICAYAACTXGC

SEQ ID NO: 2349 - protein, 20 aa, Artificial Sequence
  Synthetically generated peptide
  VARIANT (1)...(20): Xaa = Any Amino Acid
PGTCXXGEXICAYAACTGXC

SEQ ID NO: 2350 - protein, 20 aa, Artificial Sequence
  Synthetically generated peptide
  VARIANT (1)...(20): Xaa = Any Amino Acid
PGTCXXGEXICAYAACTGCX

SEQ ID NO: 2351 - protein, 19 aa, Artificial Sequence
  Synthetically generated peptide
  VARIANT (1)...(19): Xaa = Any Amino Acid
PGTCXXGEIXCAYAACTGC

SEQ ID NO: 2352 - protein, 20 aa, Artificial Sequence
  Synthetically generated peptide
  VARIANT (1)...(20): Xaa = Any Amino Acid
PGTCXXGEIXXCAYAACTGC

SEQ ID NO: 2353 - protein, 20 aa, Artificial Sequence
  Synthetically generated peptide
  VARIANT (1)...(20): Xaa = Any Amino Acid
PGTCXXGEIXCXAYAACTGC

SEQ ID NO: 2354 - protein, 20 aa, Artificial Sequence
  Synthetically generated peptide
  VARIANT (1)...(20): Xaa = Any Amino Acid
PGTCXXGEIXCAXYAACTGC

SEQ ID NO: 2355 - protein, 20 aa, Artificial Sequence
  Synthetically generated peptide
  VARIANT (1)...(20): Xaa = Any Amino Acid
PGTCXXGEIXCAYXAACTGC

SEQ ID NO: 2356 - protein, 20 aa, Artificial Sequence
  Synthetically generated peptide
  VARIANT (1)...(20): Xaa = Any Amino Acid
PGTCXXGEIXCAYAXACTGC

SEQ ID NO: 2357 - protein, 20 aa, Artificial Sequence
  Synthetically generated peptide
  VARIANT (1)...(20): Xaa = Any Amino Acid
PGTCXXGEIXCAYAAXCTGC

SEQ ID NO: 2358 - protein, 20 aa, Artificial Sequence
  Synthetically generated peptide
  VARIANT (1)...(20): Xaa = Any Amino Acid
PGTCXXGEIXCAYAACXTGC

SEQ ID NO: 2359 - protein, 20 aa, Artificial Sequence
  Synthetically generated peptide
  VARIANT (1)...(20): Xaa = Any Amino Acid
PGTCXXGEIXCAYAACTXGC

SEQ ID NO: 2360 - protein, 20 aa, Artificial Sequence
  Synthetically generated peptide
  VARIANT (1)...(20): Xaa = Any Amino Acid
PGTCXXGEIXCAYAACTGXC

SEQ ID NO: 2361 - protein, 20 aa, Artificial Sequence
  Synthetically generated peptide
  VARIANT (1)...(20): Xaa = Any Amino Acid
PGTCXXGEIXCAYAACTGCX

SEQ ID NO: 2362 - protein, 19 aa, Artificial Sequence
  Synthetically generated peptide
  VARIANT (1)...(19): Xaa = Any Amino Acid
PGTCXXGEICXAYAACTGC

SEQ ID NO: 2363 - protein, 20 aa, Artificial Sequence
  Synthetically generated peptide
  VARIANT (1)...(20): Xaa = Any Amino Acid
PGTCXXGEICXXAYAACTGC

SEQ ID NO: 2364 - protein, 20 aa, Artificial Sequence
  Synthetically generated peptide
  VARIANT (1)...(20): Xaa = Any Amino Acid
PGTCXXGEICXAXYAACTGC

SEQ ID NO: 2365 - protein, 20 aa, Artificial Sequence
  Synthetically generated peptide
  VARIANT (1)...(20): Xaa = Any Amino Acid
PGTCXXGEICXAYXAACTGC

SEQ ID NO: 2366 - protein, 20 aa, Artificial Sequence
  Synthetically generated peptide
  VARIANT (1)...(20): Xaa = Any Amino Acid
PGTCXXGEICXAYAXACTGC

SEQ ID NO: 2367 - protein, 20 aa, Artificial Sequence
  Synthetically generated peptide
  VARIANT (1)...(20): Xaa = Any Amino Acid
PGTCXXGEICXAYAAXCTGC

SEQ ID NO: 2368 - protein, 20 aa, Artificial Sequence
  Synthetically generated peptide
  VARIANT (1)...(20): Xaa = Any Amino Acid
PGTCXXGEICXAYAACXTGC

SEQ ID NO: 2369 - protein, 20 aa, Artificial Sequence
  Synthetically generated peptide
  VARIANT (1)...(20): Xaa = Any Amino Acid
PGTCXXGEICXAYAACTXGC

SEQ ID NO: 2370 - protein, 20 aa, Artificial Sequence
  Synthetically generated peptide
  VARIANT (1)...(20): Xaa = Any Amino Acid
PGTCXXGEICXAYAACTGXC

SEQ ID NO: 2371 - protein, 20 aa, Artificial Sequence
  Synthetically generated peptide
  VARIANT (1)...(20): Xaa = Any Amino Acid
PGTCXXGEICXAYAACTGCX

SEQ ID NO: 2372 - protein, 19 aa, Artificial Sequence
  Synthetically generated peptide
  VARIANT (1)...(19): Xaa = Any Amino Acid
PGTCXXGEICAXYAACTGC

SEQ ID NO: 2373 - protein, 20 aa, Artificial Sequence
  Synthetically generated peptide
  VARIANT (1)...(20): Xaa = Any Amino Acid
PGTCXXGEICAXXYAACTGC

SEQ ID NO: 2374 - protein, 20 aa, Artificial Sequence
  Synthetically generated peptide
  VARIANT (1)...(20): Xaa = Any Amino Acid
PGTCXXGEICAXYXAACTGC

SEQ ID NO: 2375 - protein, 20 aa, Artificial Sequence
  Synthetically generated peptide
  VARIANT (1)...(20): Xaa = Any Amino Acid
PGTCXXGEICAXYAXACTGC

SEQ ID NO: 2376 - protein, 20 aa, Artificial Sequence
  Synthetically generated peptide
  VARIANT (1)...(20): Xaa = Any Amino Acid
PGTCXXGEICAXYAAXCTGC

SEQ ID NO: 2377 - protein, 20 aa, Artificial Sequence
  Synthetically generated peptide
  VARIANT (1)...(20): Xaa = Any Amino Acid
PGTCXXGEICAXYAACXTGC

SEQ ID NO: 2378 - protein, 20 aa, Artificial Sequence
  Synthetically generated peptide
  VARIANT (1)...(20): Xaa = Any Amino Acid
PGTCXXGEICAXYAACTXGC

SEQ ID NO: 2379 - protein, 20 aa, Artificial Sequence
  Synthetically generated peptide
  VARIANT (1)...(20): Xaa = Any Amino Acid
PGTCXXGEICAXYAACTGXC

SEQ ID NO: 2380 - protein, 20 aa, Artificial Sequence
  Synthetically generated peptide
  VARIANT (1)...(20): Xaa = Any Amino Acid
PGTCXXGEICAXYAACTGCX

SEQ ID NO: 2381 - protein, 19 aa, Artificial Sequence
  Synthetically generated peptide
  VARIANT (1)...(19): Xaa = Any Amino Acid
PGTCXXGEICAYXAACTGC

SEQ ID NO: 2382 - protein, 20 aa, Artificial Sequence
  Synthetically generated peptide
  VARIANT (1)...(20): Xaa = Any Amino Acid
PGTCXXGEICAYXXAACTGC

SEQ ID NO: 2383 - protein, 20 aa, Artificial Sequence
  Synthetically generated peptide
  VARIANT (1)...(20): Xaa = Any Amino Acid
PGTCXXGEICAYXAXACTGC

SEQ ID NO: 2384 - protein, 20 aa, Artificial Sequence
  Synthetically generated peptide
  VARIANT (1)...(20): Xaa = Any Amino Acid
PGTCXXGEICAYXAAXCTGC

SEQ ID NO: 2385 - protein, 20 aa, Artificial Sequence
  Synthetically generated peptide
  VARIANT (1)...(20): Xaa = Any Amino Acid
PGTCXXGEICAYXAACXTGC

SEQ ID NO: 2386 - protein, 20 aa, Artificial Sequence
  Synthetically generated peptide
  VARIANT (1)...(20): Xaa = Any Amino Acid
PGTCXXGEICAYXAACTXGC

SEQ ID NO: 2387 - protein, 20 aa, Artificial Sequence
  Synthetically generated peptide
  VARIANT (1)...(20): Xaa = Any Amino Acid
PGTCXXGEICAYXAACTGXC

SEQ ID NO: 2388 - protein, 20 aa, Artificial Sequence
  Synthetically generated peptide
  VARIANT (1)...(20): Xaa = Any Amino Acid
PGTCXXGEICAYXAACTGCX

SEQ ID NO: 2389 - protein, 19 aa, Artificial Sequence
  Synthetically generated peptide
  VARIANT (1)...(19): Xaa = Any Amino Acid
PGTCXXGEICAYAXACTGC

SEQ ID NO: 2390 - protein, 20 aa, Artificial Sequence
  Synthetically generated peptide
  VARIANT (1)...(20): Xaa = Any Amino Acid
PGTCXXGEICAYAXXACTGC

SEQ ID NO: 2391 - protein, 20 aa, Artificial Sequence
  Synthetically generated peptide
  VARIANT (1)...(20): Xaa = Any Amino Acid
PGTCXXGEICAYAXAXCTGC

SEQ ID NO: 2392 - protein, 20 aa, Artificial Sequence
  Synthetically generated peptide
  VARIANT (1)...(20): Xaa = Any Amino Acid
PGTCXXGEICAYAXACXTGC

SEQ ID NO: 2393 - protein, 20 aa, Artificial Sequence
  Synthetically generated peptide
  VARIANT (1)...(20): Xaa = Any Amino Acid
PGTCXXGEICAYAXACTXGC

SEQ ID NO: 2394 - protein, 20 aa, Artificial Sequence
  Synthetically generated peptide
  VARIANT (1)...(20): Xaa = Any Amino Acid
PGTCXXGEICAYAXACTGXC

SEQ ID NO: 2395 - protein, 20 aa, Artificial Sequence
  Synthetically generated peptide
  VARIANT (1)...(20): Xaa = Any Amino Acid
PGTCXXGEICAYAXACTGCX

SEQ ID NO: 2396 - protein, 19 aa, Artificial Sequence
  Synthetically generated peptide
  VARIANT (1)...(19): Xaa = Any Amino Acid
PGTCXXGEICAYAAXCTGC

SEQ ID NO: 2397 - protein, 20 aa, Artificial Sequence
  Synthetically generated peptide
  VARIANT (1)...(20): Xaa = Any Amino Acid
PGTCXXGEICAYAAXXCTGC

SEQ ID NO: 2398 - protein, 20 aa, Artificial Sequence
  Synthetically generated peptide
  VARIANT (1)...(20): Xaa = Any Amino Acid
PGTCXXGEICAYAAXCXTGC

SEQ ID NO: 2399 - protein, 20 aa, Artificial Sequence
  Synthetically generated peptide
  VARIANT (1)...(20): Xaa = Any Amino Acid
PGTCXXGEICAYAAXCTXGC

SEQ ID NO: 2400 - protein, 20 aa, Artificial Sequence
  Synthetically generated peptide
  VARIANT (1)...(20): Xaa = Any Amino Acid
PGTCXXGEICAYAAXCTGXC

SEQ ID NO: 2401 - protein, 20 aa, Artificial Sequence
  Synthetically generated peptide
  VARIANT (1)...(20): Xaa = Any Amino Acid
PGTCXXGEICAYAAXCTGCX

SEQ ID NO: 2402 - protein, 19 aa, Artificial Sequence
  Synthetically generated peptide
  VARIANT (1)...(19): Xaa = Any Amino Acid
PGTCXXGEICAYAACXTGC

SEQ ID NO: 2403 - protein, 20 aa, Artificial Sequence
  Synthetically generated peptide
  VARIANT (1)...(20): Xaa = Any Amino Acid
PGTCXXGEICAYAACXXTGC

SEQ ID NO: 2404 - protein, 20 aa, Artificial Sequence
  Synthetically generated peptide
  VARIANT (1)...(20): Xaa = Any Amino Acid
PGTCXXGEICAYAACXTXGC

SEQ ID NO: 2405 - protein, 20 aa, Artificial Sequence
  Synthetically generated peptide
  VARIANT (1)...(20): Xaa = Any Amino Acid
PGTCXXGEICAYAACXTGXC

SEQ ID NO: 2406 - protein, 20 aa, Artificial Sequence
  Synthetically generated peptide
  VARIANT (1)...(20): Xaa = Any Amino Acid
PGTCXXGEICAYAACXTGCX

SEQ ID NO: 2407 - protein, 19 aa, Artificial Sequence
  Synthetically generated peptide
  VARIANT (1)...(19): Xaa = Any Amino Acid
PGTCXXGEICAYAACTXGC

SEQ ID NO: 2408 - protein, 20 aa, Artificial Sequence
  Synthetically generated peptide
  VARIANT (1)...(20): Xaa = Any Amino Acid
PGTCXXGEICAYAACTXXGC

SEQ ID NO: 2409 - protein, 20 aa, Artificial Sequence
  Synthetically generated peptide
  VARIANT (1)...(20): Xaa = Any Amino Acid
PGTCXXGEICAYAACTXGXC

SEQ ID NO: 2410 - protein, 20 aa, Artificial Sequence
  Synthetically generated peptide
  VARIANT (1)...(20): Xaa = Any Amino Acid
PGTCXXGEICAYAACTXGCX

SEQ ID NO: 2411 - protein, 19 aa, Artificial Sequence
  Synthetically generated peptide
  VARIANT (1)...(19): Xaa = Any Amino Acid
PGTCXXGEICAYAACTGXC

SEQ ID NO: 2412 - protein, 20 aa, Artificial Sequence
  Synthetically generated peptide
  VARIANT (1)...(20): Xaa = Any Amino Acid
PGTCXXGEICAYAACTGXXC

SEQ ID NO: 2413 - protein, 20 aa, Artificial Sequence
  Synthetically generated peptide
  VARIANT (1)...(20): Xaa = Any Amino Acid
PGTCXXGEICAYAACTGXCX

SEQ ID NO: 2414 - protein, 19 aa, Artificial Sequence
  Synthetically generated peptide
  VARIANT (1)...(19): Xaa = Any Amino Acid
PGTCXXGEICAYAACTGCX

SEQ ID NO: 2415 - protein, 20 aa, Artificial Sequence
  Synthetically generated peptide
  VARIANT (1)...(20): Xaa = Any Amino Acid
PGTCXXGEICAYAACTGCXX

SEQ ID NO: 2416 - protein, 18 aa, Artificial Sequence
  Synthetically generated peptide
  VARIANT (1)...(18): Xaa = Any Amino Acid
PGTCXGXEICAYAACTGC

SEQ ID NO: 2417 - protein, 19 aa, Artificial Sequence
  Synthetically generated peptide
  VARIANT (1)...(19): Xaa = Any Amino Acid
PGTCXGXXEICAYAACTGC

SEQ ID NO: 2418 - protein, 20 aa, Artificial Sequence
  Synthetically generated peptide
  VARIANT (1)...(20): Xaa = Any Amino Acid
PGTCXGXXXEICAYAACTGC

SEQ ID NO: 2419 - protein, 20 aa, Artificial Sequence
  Synthetically generated peptide
  VARIANT (1)...(20): Xaa = Any Amino Acid
PGTCXGXXEXICAYAACTGC

SEQ ID NO: 2420 - protein, 20 aa, Artificial Sequence
  Synthetically generated peptide
  VARIANT (1)...(20): Xaa = Any Amino Acid
PGTCXGXXEIXCAYAACTGC

SEQ ID NO: 2421 - protein, 20 aa, Artificial Sequence
  Synthetically generated peptide
  VARIANT (1)...(20): Xaa = Any Amino Acid
PGTCXGXXEICXAYAACTGC

SEQ ID NO: 2422 - protein, 20 aa, Artificial Sequence
  Synthetically generated peptide
  VARIANT (1)...(20): Xaa = Any Amino Acid
PGTCXGXXEICAXYAACTGC

SEQ ID NO: 2423 - protein, 20 aa, Artificial Sequence
  Synthetically generated peptide
  VARIANT (1)...(20): Xaa = Any Amino Acid
PGTCXGXXEICAYXAACTGC

SEQ ID NO: 2424 - protein, 20 aa, Artificial Sequence
  Synthetically generated peptide
  VARIANT (1)...(20): Xaa = Any Amino Acid
PGTCXGXXEICAYAXACTGC

SEQ ID NO: 2425 - protein, 20 aa, Artificial Sequence
  Synthetically generated peptide
  VARIANT (1)...(20): Xaa = Any Amino Acid
PGTCXGXXEICAYAAXCTGC

SEQ ID NO: 2426 - protein, 20 aa, Artificial Sequence
  Synthetically generated peptide
  VARIANT (1)...(20): Xaa = Any Amino Acid
PGTCXGXXEICAYAACXTGC

SEQ ID NO: 2427 - protein, 20 aa, Artificial Sequence
  Synthetically generated peptide
  VARIANT (1)...(20): Xaa = Any Amino Acid
PGTCXGXXEICAYAACTXGC

SEQ ID NO: 2428 - protein, 20 aa, Artificial Sequence
  Synthetically generated peptide
  VARIANT (1)...(20): Xaa = Any Amino Acid
PGTCXGXXEICAYAACTGXC

SEQ ID NO: 2429 - protein, 20 aa, Artificial Sequence
  Synthetically generated peptide
  VARIANT (1)...(20): Xaa = Any Amino Acid
PGTCXGXXEICAYAACTGCX

SEQ ID NO: 2430 - protein, 19 aa, Artificial Sequence
  Synthetically generated peptide
  VARIANT (1)...(19): Xaa = Any Amino Acid
PGTCXGXEXICAYAACTGC

SEQ ID NO: 2431 - protein, 20 aa, Artificial Sequence
  Synthetically generated peptide
  VARIANT (1)...(20): Xaa = Any Amino Acid
PGTCXGXEXXICAYAACTGC

SEQ ID NO: 2432 - protein, 20 aa, Artificial Sequence
  Synthetically generated peptide
  VARIANT (1)...(20): Xaa = Any Amino Acid
PGTCXGXEXIXCAYAACTGC

SEQ ID NO: 2433 - protein, 20 aa, Artificial Sequence
  Synthetically generated peptide
  VARIANT (1)...(20): Xaa = Any Amino Acid
PGTCXGXEXICXAYAACTGC

SEQ ID NO: 2434 - protein, 20 aa, Artificial Sequence
  Synthetically generated peptide
  VARIANT (1)...(20): Xaa = Any Amino Acid
PGTCXGXEXICAXYAACTGC

SEQ ID NO: 2435 - protein, 20 aa, Artificial Sequence
  Synthetically generated peptide
  VARIANT (1)...(20): Xaa = Any Amino Acid
PGTCXGXEXICAYXAACTGC

SEQ ID NO: 2436 - protein, 20 aa, Artificial Sequence
  Synthetically generated peptide
  VARIANT (1)...(20): Xaa = Any Amino Acid
PGTCXGXEXICAYAXACTGC

SEQ ID NO: 2437 - protein, 20 aa, Artificial Sequence
  Synthetically generated peptide
  VARIANT (1)...(20): Xaa = Any Amino Acid
PGTCXGXEXICAYAAXCTGC

SEQ ID NO: 2438 - protein, 20 aa, Artificial Sequence
  Synthetically generated peptide
  VARIANT (1)...(20): Xaa = Any Amino Acid
PGTCXGXEXICAYAACXTGC

SEQ ID NO: 2439 - protein, 20 aa, Artificial Sequence
  Synthetically generated peptide
  VARIANT (1)...(20): Xaa = Any Amino Acid
PGTCXGXEXICAYAACTXGC

SEQ ID NO: 2440 - protein, 20 aa, Artificial Sequence
  Synthetically generated peptide
  VARIANT (1)...(20): Xaa = Any Amino Acid
PGTCXGXEXICAYAACTGXC

SEQ ID NO: 2441 - protein, 20 aa, Artificial Sequence
  Synthetically generated peptide
  VARIANT (1)...(20): Xaa = Any Amino Acid
PGTCXGXEXICAYAACTGCX

SEQ ID NO: 2442 - protein, 19 aa, Artificial Sequence
  Synthetically generated peptide
  VARIANT (1)...(19): Xaa = Any Amino Acid
PGTCXGXEIXCAYAACTGC

SEQ ID NO: 2443 - protein, 20 aa, Artificial Sequence
  Synthetically generated peptide
  VARIANT (1)...(20): Xaa = Any Amino Acid
PGTCXGXEIXXCAYAACTGC

SEQ ID NO: 2444 - protein, 20 aa, Artificial Sequence
  Synthetically generated peptide
  VARIANT (1)...(20): Xaa = Any Amino Acid
PGTCXGXEIXCXAYAACTGC

SEQ ID NO: 2445 - protein, 20 aa, Artificial Sequence
  Synthetically generated peptide
  VARIANT (1)...(20): Xaa = Any Amino Acid
PGTCXGXEIXCAXYAACTGC

SEQ ID NO: 2446 - protein, 20 aa, Artificial Sequence
  Synthetically generated peptide
  VARIANT (1)...(20): Xaa = Any Amino Acid
PGTCXGXEIXCAYXAACTGC

SEQ ID NO: 2447 - protein, 20 aa, Artificial Sequence
  Synthetically generated peptide
  VARIANT (1)...(20): Xaa = Any Amino Acid
PGTCXGXEIXCAYAXACTGC

SEQ ID NO: 2448 - protein, 20 aa, Artificial Sequence
  Synthetically generated peptide
  VARIANT (1)...(20): Xaa = Any Amino Acid
PGTCXGXEIXCAYAAXCTGC

SEQ ID NO: 2449 - protein, 20 aa, Artificial Sequence
  Synthetically generated peptide
  VARIANT (1)...(20): Xaa = Any Amino Acid
PGTCXGXEIXCAYAACXTGC

SEQ ID NO: 2450 - protein, 20 aa, Artificial Sequence
  Synthetically generated peptide
  VARIANT (1)...(20): Xaa = Any Amino Acid
PGTCXGXEIXCAYAACTXGC

SEQ ID NO: 2451 - protein, 20 aa, Artificial Sequence
  Synthetically generated peptide
  VARIANT (1)...(20): Xaa = Any Amino Acid
PGTCXGXEIXCAYAACTGXC

SEQ ID NO: 2452 - protein, 20 aa, Artificial Sequence
  Synthetically generated peptide
  VARIANT (1)...(20): Xaa = Any Amino Acid
PGTCXGXEIXCAYAACTGCX

SEQ ID NO: 2453 - protein, 19 aa, Artificial Sequence
  Synthetically generated peptide
  VARIANT (1)...(19): Xaa = Any Amino Acid
PGTCXGXEICXAYAACTGC

SEQ ID NO: 2454 - protein, 20 aa, Artificial Sequence
  Synthetically generated peptide
  VARIANT (1)...(20): Xaa = Any Amino Acid
PGTCXGXEICXXAYAACTGC

SEQ ID NO: 2455 - protein, 20 aa, Artificial Sequence
  Synthetically generated peptide
  VARIANT (1)...(20): Xaa = Any Amino Acid
PGTCXGXEICXAXYAACTGC

SEQ ID NO: 2456 - protein, 20 aa, Artificial Sequence
  Synthetically generated peptide
  VARIANT (1)...(20): Xaa = Any Amino Acid
PGTCXGXEICXAYXAACTGC

SEQ ID NO: 2457 - protein, 20 aa, Artificial Sequence
  Synthetically generated peptide
  VARIANT (1)...(20): Xaa = Any Amino Acid
PGTCXGXEICXAYAXACTGC

SEQ ID NO: 2458 - protein, 20 aa, Artificial Sequence
  Synthetically generated peptide
  VARIANT (1)...(20): Xaa = Any Amino Acid
PGTCXGXEICXAYAAXCTGC

SEQ ID NO: 2459 - protein, 20 aa, Artificial Sequence
  Synthetically generated peptide
  VARIANT (1)...(20): Xaa = Any Amino Acid
PGTCXGXEICXAYAACXTGC

SEQ ID NO: 2460 - protein, 20 aa, Artificial Sequence
  Synthetically generated peptide
  VARIANT (1)...(20): Xaa = Any Amino Acid
PGTCXGXEICXAYAACTXGC

SEQ ID NO: 2461 - protein, 20 aa, Artificial Sequence
  Synthetically generated peptide
  VARIANT (1)...(20): Xaa = Any Amino Acid
PGTCXGXEICXAYAACTGXC

SEQ ID NO: 2462 - protein, 20 aa, Artificial Sequence
  Synthetically generated peptide
  VARIANT (1)...(20): Xaa = Any Amino Acid
PGTCXGXEICXAYAACTGCX

SEQ ID NO: 2463 - protein, 19 aa, Artificial Sequence
  Synthetically generated peptide
  VARIANT (1)...(19): Xaa = Any Amino Acid
PGTCXGXEICAXYAACTGC

SEQ ID NO: 2464 - protein, 20 aa, Artificial Sequence
  Synthetically generated peptide
  VARIANT (1)...(20): Xaa = Any Amino Acid
PGTCXGXEICAXXYAACTGC

SEQ ID NO: 2465 - protein, 20 aa, Artificial Sequence
  Synthetically generated peptide
  VARIANT (1)...(20): Xaa = Any Amino Acid
PGTCXGXEICAXYXAACTGC

SEQ ID NO: 2466 - protein, 20 aa, Artificial Sequence
  Synthetically generated peptide
  VARIANT (1)...(20): Xaa = Any Amino Acid
PGTCXGXEICAXYAXACTGC

SEQ ID NO: 2467 - protein, 20 aa, Artificial Sequence
  Synthetically generated peptide
  VARIANT (1)...(20): Xaa = Any Amino Acid
PGTCXGXEICAXYAAXCTGC

SEQ ID NO: 2468 - protein, 20 aa, Artificial Sequence
  Synthetically generated peptide
  VARIANT (1)...(20): Xaa = Any Amino Acid
PGTCXGXEICAXYAACXTGC

SEQ ID NO: 2469 - protein, 20 aa, Artificial Sequence
  Synthetically generated peptide
  VARIANT (1)...(20): Xaa = Any Amino Acid
PGTCXGXEICAXYAACTXGC

SEQ ID NO: 2470 - protein, 20 aa, Artificial Sequence
  Synthetically generated peptide
  VARIANT (1)...(20): Xaa = Any Amino Acid
PGTCXGXEICAXYAACTGXC

SEQ ID NO: 2471 - protein, 20 aa, Artificial Sequence
  Synthetically generated peptide
  VARIANT (1)...(20): Xaa = Any Amino Acid
PGTCXGXEICAXYAACTGCX

SEQ ID NO: 2472 - protein, 19 aa, Artificial Sequence
  Synthetically generated peptide
  VARIANT (1)...(19): Xaa = Any Amino Acid
PGTCXGXEICAYXAACTGC

SEQ ID NO: 2473 - protein, 20 aa, Artificial Sequence
  Synthetically generated peptide
  VARIANT (1)...(20): Xaa = Any Amino Acid
PGTCXGXEICAYXXAACTGC

SEQ ID NO: 2474 - protein, 20 aa, Artificial Sequence
  Synthetically generated peptide
  VARIANT (1)...(20): Xaa = Any Amino Acid
PGTCXGXEICAYXAXACTGC

SEQ ID NO: 2475 - protein, 20 aa, Artificial Sequence
  Synthetically generated peptide
  VARIANT (1)...(20): Xaa = Any Amino Acid
PGTCXGXEICAYXAAXCTGC

SEQ ID NO: 2476 - protein, 20 aa, Artificial Sequence
  Synthetically generated peptide
  VARIANT (1)...(20): Xaa = Any Amino Acid
PGTCXGXEICAYXAACXTGC

SEQ ID NO: 2477 - protein, 20 aa, Artificial Sequence
  Synthetically generated peptide
  VARIANT (1)...(20): Xaa = Any Amino Acid
PGTCXGXEICAYXAACTXGC

SEQ ID NO: 2478 - protein, 20 aa, Artificial Sequence
  Synthetically generated peptide
  VARIANT (1)...(20): Xaa = Any Amino Acid
PGTCXGXEICAYXAACTGXC

SEQ ID NO: 2479 - protein, 20 aa, Artificial Sequence
  Synthetically generated peptide
  VARIANT (1)...(20): Xaa = Any Amino Acid
PGTCXGXEICAYXAACTGCX

SEQ ID NO: 2480 - protein, 19 aa, Artificial Sequence
  Synthetically generated peptide
  VARIANT (1)...(19): Xaa = Any Amino Acid
PGTCXGXEICAYAXACTGC

SEQ ID NO: 2481 - protein, 20 aa, Artificial Sequence
  Synthetically generated peptide
  VARIANT (1)...(20): Xaa = Any Amino Acid
PGTCXGXEICAYAXXACTGC

SEQ ID NO: 2482 - protein, 20 aa, Artificial Sequence
  Synthetically generated peptide
  VARIANT (1)...(20): Xaa = Any Amino Acid
PGTCXGXEICAYAXAXCTGC

SEQ ID NO: 2483 - protein, 20 aa, Artificial Sequence
  Synthetically generated peptide
  VARIANT (1)...(20): Xaa = Any Amino Acid
PGTCXGXEICAYAXACXTGC

SEQ ID NO: 2484 - protein, 20 aa, Artificial Sequence
  Synthetically generated peptide
  VARIANT (1)...(20): Xaa = Any Amino Acid
PGTCXGXEICAYAXACTXGC

SEQ ID NO: 2485 - protein, 20 aa, Artificial Sequence
  Synthetically generated peptide
  VARIANT (1)...(20): Xaa = Any Amino Acid
PGTCXGXEICAYAXACTGXC

SEQ ID NO: 2486 - protein, 20 aa, Artificial Sequence
  Synthetically generated peptide
  VARIANT (1)...(20): Xaa = Any Amino Acid
PGTCXGXEICAYAXACTGCX

SEQ ID NO: 2487 - protein, 19 aa, Artificial Sequence
  Synthetically generated peptide
  VARIANT (1)...(19): Xaa = Any Amino Acid
PGTCXGXEICAYAAXCTGC

SEQ ID NO: 2488 - protein, 20 aa, Artificial Sequence
  Synthetically generated peptide
  VARIANT (1)...(20): Xaa = Any Amino Acid
PGTCXGXEICAYAAXXCTGC

SEQ ID NO: 2489 - protein, 20 aa, Artificial Sequence
  Synthetically generated peptide
  VARIANT (1)...(20): Xaa = Any Amino Acid
PGTCXGXEICAYAAXCXTGC

SEQ ID NO: 2490 - protein, 20 aa, Artificial Sequence
  Synthetically generated peptide
  VARIANT (1)...(20): Xaa = Any Amino Acid
PGTCXGXEICAYAAXCTXGC

SEQ ID NO: 2491 - protein, 20 aa, Artificial Sequence
  Synthetically generated peptide
  VARIANT (1)...(20): Xaa = Any Amino Acid
PGTCXGXEICAYAAXCTGXC

SEQ ID NO: 2492 - protein, 20 aa, Artificial Sequence
  Synthetically generated peptide
  VARIANT (1)...(20): Xaa = Any Amino Acid
PGTCXGXEICAYAAXCTGCX

SEQ ID NO: 2493 - protein, 19 aa, Artificial Sequence
  Synthetically generated peptide
  VARIANT (1)...(19): Xaa = Any Amino Acid
PGTCXGXEICAYAACXTGC

SEQ ID NO: 2494 - protein, 20 aa, Artificial Sequence
  Synthetically generated peptide
  VARIANT (1)...(20): Xaa = Any Amino Acid
PGTCXGXEICAYAACXXTGC

SEQ ID NO: 2495 - protein, 20 aa, Artificial Sequence
  Synthetically generated peptide
  VARIANT (1)...(20): Xaa = Any Amino Acid
PGTCXGXEICAYAACXTXGC

SEQ ID NO: 2496 - protein, 20 aa, Artificial Sequence
  Synthetically generated peptide
  VARIANT (1)...(20): Xaa = Any Amino Acid
PGTCXGXEICAYAACXTGXC

SEQ ID NO: 2497 - protein, 20 aa, Artificial Sequence
  Synthetically generated peptide
  VARIANT (1)...(20): Xaa = Any Amino Acid
PGTCXGXEICAYAACXTGCX

SEQ ID NO: 2498 - protein, 19 aa, Artificial Sequence
  Synthetically generated peptide
  VARIANT (1)...(19): Xaa = Any Amino Acid
PGTCXGXEICAYAACTXGC

SEQ ID NO: 2499 - protein, 20 aa, Artificial Sequence
  Synthetically generated peptide
  VARIANT (1)...(20): Xaa = Any Amino Acid
PGTCXGXEICAYAACTXXGC

SEQ ID NO: 2500 - protein, 20 aa, Artificial Sequence
  Synthetically generated peptide
  VARIANT (1)...(20): Xaa = Any Amino Acid
PGTCXGXEICAYAACTXGXC

SEQ ID NO: 2501 - protein, 20 aa, Artificial Sequence
  Synthetically generated peptide
  VARIANT (1)...(20): Xaa = Any Amino Acid
PGTCXGXEICAYAACTXGCX

SEQ ID NO: 2502 - protein, 19 aa, Artificial Sequence
  Synthetically generated peptide
  VARIANT (1)...(19): Xaa = Any Amino Acid
PGTCXGXEICAYAACTGXC

SEQ ID NO: 2503 - protein, 20 aa, Artificial Sequence
  Synthetically generated peptide
  VARIANT (1)...(20): Xaa = Any Amino Acid
PGTCXGXEICAYAACTGXXC

SEQ ID NO: 2504 - protein, 20 aa, Artificial Sequence
  Synthetically generated peptide
  VARIANT (1)...(20): Xaa = Any Amino Acid
PGTCXGXEICAYAACTGXCX

SEQ ID NO: 2505 - protein, 19 aa, Artificial Sequence
  Synthetically generated peptide
  VARIANT (1)...(19): Xaa = Any Amino Acid
PGTCXGXEICAYAACTGCX

SEQ ID NO: 2506 - protein, 20 aa, Artificial Sequence
  Synthetically generated peptide
  VARIANT (1)...(20): Xaa = Any Amino Acid
PGTCXGXEICAYAACTGCXX

SEQ ID NO: 2507 - protein, 18 aa, Artificial Sequence
  Synthetically generated peptide
  VARIANT (1)...(18): Xaa = Any Amino Acid
PGTCXGEXICAYAACTGC

SEQ ID NO: 2508 - protein, 19 aa, Artificial Sequence
  Synthetically generated peptide
  VARIANT (1)...(19): Xaa = Any Amino Acid
PGTCXGEXXICAYAACTGC

SEQ ID NO: 2509 - protein, 20 aa, Artificial Sequence
  Synthetically generated peptide
  VARIANT (1)...(20): Xaa = Any Amino Acid
PGTCXGEXXXICAYAACTGC

SEQ ID NO: 2510 - protein, 20 aa, Artificial Sequence
  Synthetically generated peptide
  VARIANT (1)...(20): Xaa = Any Amino Acid
PGTCXGEXXIXCAYAACTGC

SEQ ID NO: 2511 - protein, 20 aa, Artificial Sequence
  Synthetically generated peptide
  VARIANT (1)...(20): Xaa = Any Amino Acid
PGTCXGEXXICXAYAACTGC

SEQ ID NO: 2512 - protein, 20 aa, Artificial Sequence
  Synthetically generated peptide
  VARIANT (1)...(20): Xaa = Any Amino Acid
PGTCXGEXXICAXYAACTGC

SEQ ID NO: 2513 - protein, 20 aa, Artificial Sequence
  Synthetically generated peptide
  VARIANT (1)...(20): Xaa = Any Amino Acid
PGTCXGEXXICAYXAACTGC

SEQ ID NO: 2514 - protein, 20 aa, Artificial Sequence
  Synthetically generated peptide
  VARIANT (1)...(20): Xaa = Any Amino Acid
PGTCXGEXXICAYAXACTGC

SEQ ID NO: 2515 - protein, 20 aa, Artificial Sequence
  Synthetically generated peptide
  VARIANT (1)...(20): Xaa = Any Amino Acid
PGTCXGEXXICAYAAXCTGC

SEQ ID NO: 2516 - protein, 20 aa, Artificial Sequence
  Synthetically generated peptide
  VARIANT (1)...(20): Xaa = Any Amino Acid
PGTCXGEXXICAYAACXTGC

SEQ ID NO: 2517 - protein, 20 aa, Artificial Sequence
  Synthetically generated peptide
  VARIANT (1)...(20): Xaa = Any Amino Acid
PGTCXGEXXICAYAACTXGC

SEQ ID NO: 2518 - protein, 20 aa, Artificial Sequence
  Synthetically generated peptide
  VARIANT (1)...(20): Xaa = Any Amino Acid
PGTCXGEXXICAYAACTGXC

SEQ ID NO: 2519 - protein, 20 aa, Artificial Sequence
  Synthetically generated peptide
  VARIANT (1)...(20): Xaa = Any Amino Acid
PGTCXGEXXICAYAACTGCX

SEQ ID NO: 2520 - protein, 19 aa, Artificial Sequence
  Synthetically generated peptide
  VARIANT (1)...(19): Xaa = Any Amino Acid
PGTCXGEXIXCAYAACTGC

SEQ ID NO: 2521 - protein, 20 aa, Artificial Sequence
  Synthetically generated peptide
  VARIANT (1)...(20): Xaa = Any Amino Acid
PGTCXGEXIXXCAYAACTGC

SEQ ID NO: 2522 - protein, 20 aa, Artificial Sequence
  Synthetically generated peptide
  VARIANT (1)...(20): Xaa = Any Amino Acid
PGTCXGEXIXCXAYAACTGC

SEQ ID NO: 2523 - protein, 20 aa, Artificial Sequence
  Synthetically generated peptide
  VARIANT (1)...(20): Xaa = Any Amino Acid
PGTCXGEXIXCAXYAACTGC

SEQ ID NO: 2524 - protein, 20 aa, Artificial Sequence
  Synthetically generated peptide
  VARIANT (1)...(20): Xaa = Any Amino Acid
PGTCXGEXIXCAYXAACTGC

SEQ ID NO: 2525 - protein, 20 aa, Artificial Sequence
  Synthetically generated peptide
  VARIANT (1)...(20): Xaa = Any Amino Acid
PGTCXGEXIXCAYAXACTGC

SEQ ID NO: 2526 - protein, 20 aa, Artificial Sequence
  Synthetically generated peptide
  VARIANT (1)...(20): Xaa = Any Amino Acid
PGTCXGEXIXCAYAAXCTGC

SEQ ID NO: 2527 - protein, 20 aa, Artificial Sequence
  Synthetically generated peptide
  VARIANT (1)...(20): Xaa = Any Amino Acid
PGTCXGEXIXCAYAACXTGC

SEQ ID NO: 2528 - protein, 20 aa, Artificial Sequence
  Synthetically generated peptide
  VARIANT (1)...(20): Xaa = Any Amino Acid
PGTCXGEXIXCAYAACTXGC

SEQ ID NO: 2529 - protein, 20 aa, Artificial Sequence
  Synthetically generated peptide
  VARIANT (1)...(20): Xaa = Any Amino Acid
PGTCXGEXIXCAYAACTGXC

SEQ ID NO: 2530 - protein, 20 aa, Artificial Sequence
  Synthetically generated peptide
  VARIANT (1)...(20): Xaa = Any Amino Acid
PGTCXGEXIXCAYAACTGCX

SEQ ID NO: 2531 - protein, 19 aa, Artificial Sequence
  Synthetically generated peptide
  VARIANT (1)...(19): Xaa = Any Amino Acid
PGTCXGEXICXAYAACTGC

SEQ ID NO: 2532 - protein, 20 aa, Artificial Sequence
  Synthetically generated peptide
  VARIANT (1)...(20): Xaa = Any Amino Acid
PGTCXGEXICXXAYAACTGC

SEQ ID NO: 2533 - protein, 20 aa, Artificial Sequence
  Synthetically generated peptide
  VARIANT (1)...(20): Xaa = Any Amino Acid
PGTCXGEXICXAXYAACTGC

SEQ ID NO: 2534 - protein, 20 aa, Artificial Sequence
  Synthetically generated peptide
  VARIANT (1)...(20): Xaa = Any Amino Acid
PGTCXGEXICXAYXAACTGC

SEQ ID NO: 2535 - protein, 20 aa, Artificial Sequence
  Synthetically generated peptide
  VARIANT (1)...(20): Xaa = Any Amino Acid
PGTCXGEXICXAYAXACTGC

SEQ ID NO: 2536 - protein, 20 aa, Artificial Sequence
  Synthetically generated peptide
  VARIANT (1)...(20): Xaa = Any Amino Acid
PGTCXGEXICXAYAAXCTGC

SEQ ID NO: 2537 - protein, 20 aa, Artificial Sequence
  Synthetically generated peptide
  VARIANT (1)...(20): Xaa = Any Amino Acid
PGTCXGEXICXAYAACXTGC

SEQ ID NO: 2538 - protein, 20 aa, Artificial Sequence
  Synthetically generated peptide
  VARIANT (1)...(20): Xaa = Any Amino Acid
PGTCXGEXICXAYAACTXGC

SEQ ID NO: 2539 - protein, 20 aa, Artificial Sequence
  Synthetically generated peptide
  VARIANT (1)...(20): Xaa = Any Amino Acid
PGTCXGEXICXAYAACTGXC

SEQ ID NO: 2540 - protein, 20 aa, Artificial Sequence
  Synthetically generated peptide
  VARIANT (1)...(20): Xaa = Any Amino Acid
PGTCXGEXICXAYAACTGCX

SEQ ID NO: 2541 - protein, 19 aa, Artificial Sequence
  Synthetically generated peptide
  VARIANT (1)...(19): Xaa = Any Amino Acid
PGTCXGEXICAXYAACTGC

SEQ ID NO: 2542 - protein, 20 aa, Artificial Sequence
  Synthetically generated peptide
  VARIANT (1)...(20): Xaa = Any Amino Acid
PGTCXGEXICAXXYAACTGC

SEQ ID NO: 2543 - protein, 20 aa, Artificial Sequence
  Synthetically generated peptide
  VARIANT (1)...(20): Xaa = Any Amino Acid
PGTCXGEXICAXYXAACTGC

SEQ ID NO: 2544 - protein, 20 aa, Artificial Sequence
  Synthetically generated peptide
  VARIANT (1)...(20): Xaa = Any Amino Acid
PGTCXGEXICAXYAXACTGC

SEQ ID NO: 2545 - protein, 20 aa, Artificial Sequence
  Synthetically generated peptide
  VARIANT (1)...(20): Xaa = Any Amino Acid
PGTCXGEXICAXYAAXCTGC

SEQ ID NO: 2546 - protein, 20 aa, Artificial Sequence
  Synthetically generated peptide
  VARIANT (1)...(20): Xaa = Any Amino Acid
PGTCXGEXICAXYAACXTGC

SEQ ID NO: 2547 - protein, 20 aa, Artificial Sequence
  Synthetically generated peptide
  VARIANT (1)...(20): Xaa = Any Amino Acid
PGTCXGEXICAXYAACTXGC

SEQ ID NO: 2548 - protein, 20 aa, Artificial Sequence
  Synthetically generated peptide
  VARIANT (1)...(20): Xaa = Any Amino Acid
PGTCXGEXICAXYAACTGXC

SEQ ID NO: 2549 - protein, 20 aa, Artificial Sequence
  Synthetically generated peptide
  VARIANT (1)...(20): Xaa = Any Amino Acid
PGTCXGEXICAXYAACTGCX

SEQ ID NO: 2550 - protein, 19 aa, Artificial Sequence
  Synthetically generated peptide
  VARIANT (1)...(19): Xaa = Any Amino Acid
PGTCXGEXICAYXAACTGC

SEQ ID NO: 2551 - protein, 20 aa, Artificial Sequence
  Synthetically generated peptide
  VARIANT (1)...(20): Xaa = Any Amino Acid
PGTCXGEXICAYXXAACTGC

SEQ ID NO: 2552 - protein, 20 aa, Artificial Sequence
  Synthetically generated peptide
  VARIANT (1)...(20): Xaa = Any Amino Acid
PGTCXGEXICAYXAXACTGC

SEQ ID NO: 2553 - protein, 20 aa, Artificial Sequence
  Synthetically generated peptide
  VARIANT (1)...(20): Xaa = Any Amino Acid
PGTCXGEXICAYXAAXCTGC

SEQ ID NO: 2554 - protein, 20 aa, Artificial Sequence
  Synthetically generated peptide
  VARIANT (1)...(20): Xaa = Any Amino Acid
PGTCXGEXICAYXAACXTGC

SEQ ID NO: 2555 - protein, 20 aa, Artificial Sequence
  Synthetically generated peptide
  VARIANT (1)...(20): Xaa = Any Amino Acid
PGTCXGEXICAYXAACTXGC

SEQ ID NO: 2556 - protein, 20 aa, Artificial Sequence
  Synthetically generated peptide
  VARIANT (1)...(20): Xaa = Any Amino Acid
PGTCXGEXICAYXAACTGXC

SEQ ID NO: 2557 - protein, 20 aa, Artificial Sequence
  Synthetically generated peptide
  VARIANT (1)...(20): Xaa = Any Amino Acid
PGTCXGEXICAYXAACTGCX

SEQ ID NO: 2558 - protein, 19 aa, Artificial Sequence
  Synthetically generated peptide
  VARIANT (1)...(19): Xaa = Any Amino Acid
PGTCXGEXICAYAXACTGC

SEQ ID NO: 2559 - protein, 20 aa, Artificial Sequence
  Synthetically generated peptide
  VARIANT (1)...(20): Xaa = Any Amino Acid
PGTCXGEXICAYAXXACTGC

SEQ ID NO: 2560 - protein, 20 aa, Artificial Sequence
  Synthetically generated peptide
  VARIANT (1)...(20): Xaa = Any Amino Acid
PGTCXGEXICAYAXAXCTGC

SEQ ID NO: 2561 - protein, 20 aa, Artificial Sequence
  Synthetically generated peptide
  VARIANT (1)...(20): Xaa = Any Amino Acid
PGTCXGEXICAYAXACXTGC

SEQ ID NO: 2562 - protein, 20 aa, Artificial Sequence
  Synthetically generated peptide
  VARIANT (1)...(20): Xaa = Any Amino Acid
PGTCXGEXICAYAXACTXGC

SEQ ID NO: 2563 - protein, 20 aa, Artificial Sequence
  Synthetically generated peptide
  VARIANT (1)...(20): Xaa = Any Amino Acid
PGTCXGEXICAYAXACTGXC

SEQ ID NO: 2564 - protein, 20 aa, Artificial Sequence
  Synthetically generated peptide
  VARIANT (1)...(20): Xaa = Any Amino Acid
PGTCXGEXICAYAXACTGCX

SEQ ID NO: 2565 - protein, 19 aa, Artificial Sequence
  Synthetically generated peptide
  VARIANT (1)...(19): Xaa = Any Amino Acid
PGTCXGEXICAYAAXCTGC

SEQ ID NO: 2566 - protein, 20 aa, Artificial Sequence
  Synthetically generated peptide
  VARIANT (1)...(20): Xaa = Any Amino Acid
PGTCXGEXICAYAAXXCTGC

SEQ ID NO: 2567 - protein, 20 aa, Artificial Sequence
  Synthetically generated peptide
  VARIANT (1)...(20): Xaa = Any Amino Acid
PGTCXGEXICAYAAXCXTGC

SEQ ID NO: 2568 - protein, 20 aa, Artificial Sequence
  Synthetically generated peptide
  VARIANT (1)...(20): Xaa = Any Amino Acid
PGTCXGEXICAYAAXCTXGC

SEQ ID NO: 2569 - protein, 20 aa, Artificial Sequence
  Synthetically generated peptide
  VARIANT (1)...(20): Xaa = Any Amino Acid
PGTCXGEXICAYAAXCTGXC

SEQ ID NO: 2570 - protein, 20 aa, Artificial Sequence
  Synthetically generated peptide
  VARIANT (1)...(20): Xaa = Any Amino Acid
PGTCXGEXICAYAAXCTGCX

SEQ ID NO: 2571 - protein, 19 aa, Artificial Sequence
  Synthetically generated peptide
  VARIANT (1)...(19): Xaa = Any Amino Acid
PGTCXGEXICAYAACXTGC

SEQ ID NO: 2572 - protein, 20 aa, Artificial Sequence
  Synthetically generated peptide
  VARIANT (1)...(20): Xaa = Any Amino Acid
PGTCXGEXICAYAACXXTGC

SEQ ID NO: 2573 - protein, 20 aa, Artificial Sequence
  Synthetically generated peptide
  VARIANT (1)...(20): Xaa = Any Amino Acid
PGTCXGEXICAYAACXTXGC

SEQ ID NO: 2574 - protein, 20 aa, Artificial Sequence
  Synthetically generated peptide
  VARIANT (1)...(20): Xaa = Any Amino Acid
PGTCXGEXICAYAACXTGXC

SEQ ID NO: 2575 - protein, 20 aa, Artificial Sequence
  Synthetically generated peptide
  VARIANT (1)...(20): Xaa = Any Amino Acid
PGTCXGEXICAYAACXTGCX

SEQ ID NO: 2576 - protein, 19 aa, Artificial Sequence
  Synthetically generated peptide
  VARIANT (1)...(19): Xaa = Any Amino Acid
PGTCXGEXICAYAACTXGC

SEQ ID NO: 2577 - protein, 20 aa, Artificial Sequence
  Synthetically generated peptide
  VARIANT (1)...(20): Xaa = Any Amino Acid
PGTCXGEXICAYAACTXXGC

SEQ ID NO: 2578 - protein, 20 aa, Artificial Sequence
  Synthetically generated peptide
  VARIANT (1)...(20): Xaa = Any Amino Acid
PGTCXGEXICAYAACTXGXC

SEQ ID NO: 2579 - protein, 20 aa, Artificial Sequence
  Synthetically generated peptide
  VARIANT (1)...(20): Xaa = Any Amino Acid
PGTCXGEXICAYAACTXGCX

SEQ ID NO: 2580 - protein, 19 aa, Artificial Sequence
  Synthetically generated peptide
  VARIANT (1)...(19): Xaa = Any Amino Acid
PGTCXGEXICAYAACTGXC

SEQ ID NO: 2581 - protein, 20 aa, Artificial Sequence
  Synthetically generated peptide
  VARIANT (1)...(20): Xaa = Any Amino Acid
PGTCXGEXICAYAACTGXXC

SEQ ID NO: 2582 - protein, 20 aa, Artificial Sequence
  Synthetically generated peptide
  VARIANT (1)...(20): Xaa = Any Amino Acid
PGTCXGEXICAYAACTGXCX

SEQ ID NO: 2583 - protein, 19 aa, Artificial Sequence
  Synthetically generated peptide
  VARIANT (1)...(19): Xaa = Any Amino Acid
PGTCXGEXICAYAACTGCX

SEQ ID NO: 2584 - protein, 20 aa, Artificial Sequence
  Synthetically generated peptide
  VARIANT (1)...(20): Xaa = Any Amino Acid
PGTCXGEXICAYAACTGCXX

SEQ ID NO: 2585 - protein, 18 aa, Artificial Sequence
  Synthetically generated peptide
  VARIANT (1)...(18): Xaa = Any Amino Acid
PGTCXGEIXCAYAACTGC

SEQ ID NO: 2586 - protein, 19 aa, Artificial Sequence
  Synthetically generated peptide
  VARIANT (1)...(19): Xaa = Any Amino Acid
PGTCXGEIXXCAYAACTGC

SEQ ID NO: 2587 - protein, 20 aa, Artificial Sequence
  Synthetically generated peptide
  VARIANT (1)...(20): Xaa = Any Amino Acid
PGTCXGEIXXXCAYAACTGC

SEQ ID NO: 2588 - protein, 20 aa, Artificial Sequence
  Synthetically generated peptide
  VARIANT (1)...(20): Xaa = Any Amino Acid
PGTCXGEIXXCXAYAACTGC

SEQ ID NO: 2589 - protein, 20 aa, Artificial Sequence
  Synthetically generated peptide
  VARIANT (1)...(20): Xaa = Any Amino Acid
PGTCXGEIXXCAXYAACTGC

SEQ ID NO: 2590 - protein, 20 aa, Artificial Sequence
  Synthetically generated peptide
  VARIANT (1)...(20): Xaa = Any Amino Acid
PGTCXGEIXXCAYXAACTGC

SEQ ID NO: 2591 - protein, 20 aa, Artificial Sequence
  Synthetically generated peptide
  VARIANT (1)...(20): Xaa = Any Amino Acid
PGTCXGEIXXCAYAXACTGC

SEQ ID NO: 2592 - protein, 20 aa, Artificial Sequence
  Synthetically generated peptide
  VARIANT (1)...(20): Xaa = Any Amino Acid
PGTCXGEIXXCAYAAXCTGC

SEQ ID NO: 2593 - protein, 20 aa, Artificial Sequence
  Synthetically generated peptide
  VARIANT (1)...(20): Xaa = Any Amino Acid
PGTCXGEIXXCAYAACXTGC

SEQ ID NO: 2594 - protein, 20 aa, Artificial Sequence
  Synthetically generated peptide
  VARIANT (1)...(20): Xaa = Any Amino Acid
PGTCXGEIXXCAYAACTXGC

SEQ ID NO: 2595 - protein, 20 aa, Artificial Sequence
  Synthetically generated peptide
  VARIANT (1)...(20): Xaa = Any Amino Acid
PGTCXGEIXXCAYAACTGXC

SEQ ID NO: 2596 - protein, 20 aa, Artificial Sequence
  Synthetically generated peptide
  VARIANT (1)...(20): Xaa = Any Amino Acid
PGTCXGEIXXCAYAACTGCX

SEQ ID NO: 2597 - protein, 19 aa, Artificial Sequence
  Synthetically generated peptide
  VARIANT (1)...(19): Xaa = Any Amino Acid
PGTCXGEIXCXAYAACTGC

SEQ ID NO: 2598 - protein, 20 aa, Artificial Sequence
  Synthetically generated peptide
  VARIANT (1)...(20): Xaa = Any Amino Acid
PGTCXGEIXCXXAYAACTGC

SEQ ID NO: 2599 - protein, 20 aa, Artificial Sequence
  Synthetically generated peptide
  VARIANT (1)...(20): Xaa = Any Amino Acid
PGTCXGEIXCXAXYAACTGC

SEQ ID NO: 2600 - protein, 20 aa, Artificial Sequence
  Synthetically generated peptide
  VARIANT (1)...(20): Xaa = Any Amino Acid
PGTCXGEIXCXAYXAACTGC

SEQ ID NO: 2601 - protein, 20 aa, Artificial Sequence
  Synthetically generated peptide
  VARIANT (1)...(20): Xaa = Any Amino Acid
PGTCXGEIXCXAYAXACTGC

SEQ ID NO: 2602 - protein, 20 aa, Artificial Sequence
  Synthetically generated peptide
  VARIANT (1)...(20): Xaa = Any Amino Acid
PGTCXGEIXCXAYAAXCTGC

SEQ ID NO: 2603 - protein, 20 aa, Artificial Sequence
  Synthetically generated peptide
  VARIANT (1)...(20): Xaa = Any Amino Acid
PGTCXGEIXCXAYAACXTGC

SEQ ID NO: 2604 - protein, 20 aa, Artificial Sequence
  Synthetically generated peptide
  VARIANT (1)...(20): Xaa = Any Amino Acid
PGTCXGEIXCXAYAACTXGC

SEQ ID NO: 2605 - protein, 20 aa, Artificial Sequence
  Synthetically generated peptide
  VARIANT (1)...(20): Xaa = Any Amino Acid
PGTCXGEIXCXAYAACTGXC

SEQ ID NO: 2606 - protein, 20 aa, Artificial Sequence
  Synthetically generated peptide
  VARIANT (1)...(20): Xaa = Any Amino Acid
PGTCXGEIXCXAYAACTGCX

SEQ ID NO: 2607 - protein, 19 aa, Artificial Sequence
  Synthetically generated peptide
  VARIANT (1)...(19): Xaa = Any Amino Acid
PGTCXGEIXCAXYAACTGC

SEQ ID NO: 2608 - protein, 20 aa, Artificial Sequence
  Synthetically generated peptide
  VARIANT (1)...(20): Xaa = Any Amino Acid
PGTCXGEIXCAXXYAACTGC

SEQ ID NO: 2609 - protein, 20 aa, Artificial Sequence
  Synthetically generated peptide
  VARIANT (1)...(20): Xaa = Any Amino Acid
PGTCXGEIXCAXYXAACTGC

SEQ ID NO: 2610 - protein, 20 aa, Artificial Sequence
  Synthetically generated peptide
  VARIANT (1)...(20): Xaa = Any Amino Acid
PGTCXGEIXCAXYAXACTGC

SEQ ID NO: 2611 - protein, 20 aa, Artificial Sequence
  Synthetically generated peptide
  VARIANT (1)...(20): Xaa = Any Amino Acid
PGTCXGEIXCAXYAAXCTGC

SEQ ID NO: 2612 - protein, 20 aa, Artificial Sequence
  Synthetically generated peptide
  VARIANT (1)...(20): Xaa = Any Amino Acid
PGTCXGEIXCAXYAACXTGC

SEQ ID NO: 2613 - protein, 20 aa, Artificial Sequence
  Synthetically generated peptide
  VARIANT (1)...(20): Xaa = Any Amino Acid
PGTCXGEIXCAXYAACTXGC

SEQ ID NO: 2614 - protein, 20 aa, Artificial Sequence
  Synthetically generated peptide
  VARIANT (1)...(20): Xaa = Any Amino Acid
PGTCXGEIXCAXYAACTGXC

SEQ ID NO: 2615 - protein, 20 aa, Artificial Sequence
  Synthetically generated peptide
  VARIANT (1)...(20): Xaa = Any Amino Acid
PGTCXGEIXCAXYAACTGCX

SEQ ID NO: 2616 - protein, 19 aa, Artificial Sequence
  Synthetically generated peptide
  VARIANT (1)...(19): Xaa = Any Amino Acid
PGTCXGEIXCAYXAACTGC

SEQ ID NO: 2617 - protein, 20 aa, Artificial Sequence
  Synthetically generated peptide
  VARIANT (1)...(20): Xaa = Any Amino Acid
PGTCXGEIXCAYXXAACTGC

SEQ ID NO: 2618 - protein, 20 aa, Artificial Sequence
  Synthetically generated peptide
  VARIANT (1)...(20): Xaa = Any Amino Acid
PGTCXGEIXCAYXAXACTGC

SEQ ID NO: 2619 - protein, 20 aa, Artificial Sequence
  Synthetically generated peptide
  VARIANT (1)...(20): Xaa = Any Amino Acid
PGTCXGEIXCAYXAAXCTGC

SEQ ID NO: 2620 - protein, 20 aa, Artificial Sequence
  Synthetically generated peptide
  VARIANT (1)...(20): Xaa = Any Amino Acid
PGTCXGEIXCAYXAACXTGC

SEQ ID NO: 2621 - protein, 20 aa, Artificial Sequence
  Synthetically generated peptide
  VARIANT (1)...(20): Xaa = Any Amino Acid
PGTCXGEIXCAYXAACTXGC

SEQ ID NO: 2622 - protein, 20 aa, Artificial Sequence
  Synthetically generated peptide
  VARIANT (1)...(20): Xaa = Any Amino Acid
PGTCXGEIXCAYXAACTGXC

SEQ ID NO: 2623 - protein, 20 aa, Artificial Sequence
  Synthetically generated peptide
  VARIANT (1)...(20): Xaa = Any Amino Acid
PGTCXGEIXCAYXAACTGCX

SEQ ID NO: 2624 - protein, 19 aa, Artificial Sequence
  Synthetically generated peptide
  VARIANT (1)...(19): Xaa = Any Amino Acid
PGTCXGEIXCAYAXACTGC

SEQ ID NO: 2625 - protein, 20 aa, Artificial Sequence
  Synthetically generated peptide
  VARIANT (1)...(20): Xaa = Any Amino Acid
PGTCXGEIXCAYAXXACTGC

SEQ ID NO: 2626 - protein, 20 aa, Artificial Sequence
  Synthetically generated peptide
  VARIANT (1)...(20): Xaa = Any Amino Acid
PGTCXGEIXCAYAXAXCTGC

SEQ ID NO: 2627 - protein, 20 aa, Artificial Sequence
  Synthetically generated peptide
  VARIANT (1)...(20): Xaa = Any Amino Acid
PGTCXGEIXCAYAXACXTGC

SEQ ID NO: 2628 - protein, 20 aa, Artificial Sequence
  Synthetically generated peptide
  VARIANT (1)...(20): Xaa = Any Amino Acid
PGTCXGEIXCAYAXACTXGC

SEQ ID NO: 2629 - protein, 20 aa, Artificial Sequence
  Synthetically generated peptide
  VARIANT (1)...(20): Xaa = Any Amino Acid
PGTCXGEIXCAYAXACTGXC

SEQ ID NO: 2630 - protein, 20 aa, Artificial Sequence
  Synthetically generated peptide
  VARIANT (1)...(20): Xaa = Any Amino Acid
PGTCXGEIXCAYAXACTGCX

SEQ ID NO: 2631 - protein, 19 aa, Artificial Sequence
  Synthetically generated peptide
  VARIANT (1)...(19): Xaa = Any Amino Acid
PGTCXGEIXCAYAAXCTGC

SEQ ID NO: 2632 - protein, 20 aa, Artificial Sequence
  Synthetically generated peptide
  VARIANT (1)...(20): Xaa = Any Amino Acid
PGTCXGEIXCAYAAXXCTGC

SEQ ID NO: 2633 - protein, 20 aa, Artificial Sequence
  Synthetically generated peptide
  VARIANT (1)...(20): Xaa = Any Amino Acid
PGTCXGEIXCAYAAXCXTGC

SEQ ID NO: 2634 - protein, 20 aa, Artificial Sequence
  Synthetically generated peptide
  VARIANT (1)...(20): Xaa = Any Amino Acid
PGTCXGEIXCAYAAXCTXGC

SEQ ID NO: 2635 - protein, 20 aa, Artificial Sequence
  Synthetically generated peptide
  VARIANT (1)...(20): Xaa = Any Amino Acid
PGTCXGEIXCAYAAXCTGXC

SEQ ID NO: 2636 - protein, 20 aa, Artificial Sequence
  Synthetically generated peptide
  VARIANT (1)...(20): Xaa = Any Amino Acid
PGTCXGEIXCAYAAXCTGCX

SEQ ID NO: 2637 - protein, 19 aa, Artificial Sequence
  Synthetically generated peptide
  VARIANT (1)...(19): Xaa = Any Amino Acid
PGTCXGEIXCAYAACXTGC

SEQ ID NO: 2638 - protein, 20 aa, Artificial Sequence
  Synthetically generated peptide
  VARIANT (1)...(20): Xaa = Any Amino Acid
PGTCXGEIXCAYAACXXTGC

SEQ ID NO: 2639 - protein, 20 aa, Artificial Sequence
  Synthetically generated peptide
  VARIANT (1)...(20): Xaa = Any Amino Acid
PGTCXGEIXCAYAACXTXGC

SEQ ID NO: 2640 - protein, 20 aa, Artificial Sequence
  Synthetically generated peptide
  VARIANT (1)...(20): Xaa = Any Amino Acid
PGTCXGEIXCAYAACXTGXC

SEQ ID NO: 2641 - protein, 20 aa, Artificial Sequence
  Synthetically generated peptide
  VARIANT (1)...(20): Xaa = Any Amino Acid
PGTCXGEIXCAYAACXTGCX

SEQ ID NO: 2642 - protein, 19 aa, Artificial Sequence
  Synthetically generated peptide
  VARIANT (1)...(19): Xaa = Any Amino Acid
PGTCXGEIXCAYAACTXGC

SEQ ID NO: 2643 - protein, 20 aa, Artificial Sequence
  Synthetically generated peptide
  VARIANT (1)...(20): Xaa = Any Amino Acid
PGTCXGEIXCAYAACTXXGC

SEQ ID NO: 2644 - protein, 20 aa, Artificial Sequence
  Synthetically generated peptide
  VARIANT (1)...(20): Xaa = Any Amino Acid
PGTCXGEIXCAYAACTXGXC

SEQ ID NO: 2645 - protein, 20 aa, Artificial Sequence
  Synthetically generated peptide
  VARIANT (1)...(20): Xaa = Any Amino Acid
PGTCXGEIXCAYAACTXGCX

SEQ ID NO: 2646 - protein, 19 aa, Artificial Sequence
  Synthetically generated peptide
  VARIANT (1)...(19): Xaa = Any Amino Acid
PGTCXGEIXCAYAACTGXC

SEQ ID NO: 2647 - protein, 20 aa, Artificial Sequence
  Synthetically generated peptide
  VARIANT (1)...(20): Xaa = Any Amino Acid
PGTCXGEIXCAYAACTGXXC

SEQ ID NO: 2648 - protein, 20 aa, Artificial Sequence
  Synthetically generated peptide
  VARIANT (1)...(20): Xaa = Any Amino Acid
PGTCXGEIXCAYAACTGXCX

SEQ ID NO: 2649 - protein, 19 aa, Artificial Sequence
  Synthetically generated peptide
  VARIANT (1)...(19): Xaa = Any Amino Acid
PGTCXGEIXCAYAACTGCX

SEQ ID NO: 2650 - protein, 20 aa, Artificial Sequence
  Synthetically generated peptide
  VARIANT (1)...(20): Xaa = Any Amino Acid
PGTCXGEIXCAYAACTGCXX

SEQ ID NO: 2651 - protein, 18 aa, Artificial Sequence
  Synthetically generated peptide
  VARIANT (1)...(18): Xaa = Any Amino Acid
PGTCXGEICXAYAACTGC

SEQ ID NO: 2652 - protein, 19 aa, Artificial Sequence
  Synthetically generated peptide
  VARIANT (1)...(19): Xaa = Any Amino Acid
PGTCXGEICXXAYAACTGC

SEQ ID NO: 2653 - protein, 20 aa, Artificial Sequence
  Synthetically generated peptide
  VARIANT (1)...(20): Xaa = Any Amino Acid
PGTCXGEICXXXAYAACTGC

SEQ ID NO: 2654 - protein, 20 aa, Artificial Sequence
  Synthetically generated peptide
  VARIANT (1)...(20): Xaa = Any Amino Acid
PGTCXGEICXXAXYAACTGC

SEQ ID NO: 2655 - protein, 20 aa, Artificial Sequence
  Synthetically generated peptide
  VARIANT (1)...(20): Xaa = Any Amino Acid
PGTCXGEICXXAYXAACTGC

SEQ ID NO: 2656 - protein, 20 aa, Artificial Sequence
  Synthetically generated peptide
  VARIANT (1)...(20): Xaa = Any Amino Acid
PGTCXGEICXXAYAXACTGC

SEQ ID NO: 2657 - protein, 20 aa, Artificial Sequence
  Synthetically generated peptide
  VARIANT (1)...(20): Xaa = Any Amino Acid
PGTCXGEICXXAYAAXCTGC

SEQ ID NO: 2658 - protein, 20 aa, Artificial Sequence
  Synthetically generated peptide
  VARIANT (1)...(20): Xaa = Any Amino Acid
PGTCXGEICXXAYAACXTGC

SEQ ID NO: 2659 - protein, 20 aa, Artificial Sequence
  Synthetically generated peptide
  VARIANT (1)...(20): Xaa = Any Amino Acid
PGTCXGEICXXAYAACTXGC

SEQ ID NO: 2660 - protein, 20 aa, Artificial Sequence
  Synthetically generated peptide
  VARIANT (1)...(20): Xaa = Any Amino Acid
PGTCXGEICXXAYAACTGXC

SEQ ID NO: 2661 - protein, 20 aa, Artificial Sequence
  Synthetically generated peptide
  VARIANT (1)...(20): Xaa = Any Amino Acid
PGTCXGEICXXAYAACTGCX

SEQ ID NO: 2662 - protein, 19 aa, Artificial Sequence
  Synthetically generated peptide
  VARIANT (1)...(19): Xaa = Any Amino Acid
PGTCXGEICXAXYAACTGC

SEQ ID NO: 2663 - protein, 20 aa, Artificial Sequence
  Synthetically generated peptide
  VARIANT (1)...(20): Xaa = Any Amino Acid
PGTCXGEICXAXXYAACTGC

SEQ ID NO: 2664 - protein, 20 aa, Artificial Sequence
  Synthetically generated peptide
  VARIANT (1)...(20): Xaa = Any Amino Acid
PGTCXGEICXAXYXAACTGC

SEQ ID NO: 2665 - protein, 20 aa, Artificial Sequence
  Synthetically generated peptide
  VARIANT (1)...(20): Xaa = Any Amino Acid
PGTCXGEICXAXYAXACTGC

SEQ ID NO: 2666 - protein, 20 aa, Artificial Sequence
  Synthetically generated peptide
  VARIANT (1)...(20): Xaa = Any Amino Acid
PGTCXGEICXAXYAAXCTGC

SEQ ID NO: 2667 - protein, 20 aa, Artificial Sequence
  Synthetically generated peptide
  VARIANT (1)...(20): Xaa = Any Amino Acid
PGTCXGEICXAXYAACXTGC

SEQ ID NO: 2668 - protein, 20 aa, Artificial Sequence
  Synthetically generated peptide
  VARIANT (1)...(20): Xaa = Any Amino Acid
PGTCXGEICXAXYAACTXGC

SEQ ID NO: 2669 - protein, 20 aa, Artificial Sequence
  Synthetically generated peptide
  VARIANT (1)...(20): Xaa = Any Amino Acid
PGTCXGEICXAXYAACTGXC

SEQ ID NO: 2670 - protein, 20 aa, Artificial Sequence
  Synthetically generated peptide
  VARIANT (1)...(20): Xaa = Any Amino Acid
PGTCXGEICXAXYAACTGCX

SEQ ID NO: 2671 - protein, 19 aa, Artificial Sequence
  Synthetically generated peptide
  VARIANT (1)...(19): Xaa = Any Amino Acid
PGTCXGEICXAYXAACTGC

SEQ ID NO: 2672 - protein, 20 aa, Artificial Sequence
  Synthetically generated peptide
  VARIANT (1)...(20): Xaa = Any Amino Acid
PGTCXGEICXAYXXAACTGC

SEQ ID NO: 2673 - protein, 20 aa, Artificial Sequence
  Synthetically generated peptide
  VARIANT (1)...(20): Xaa = Any Amino Acid
PGTCXGEICXAYXAXACTGC

SEQ ID NO: 2674 - protein, 20 aa, Artificial Sequence
  Synthetically generated peptide
  VARIANT (1)...(20): Xaa = Any Amino Acid
PGTCXGEICXAYXAAXCTGC

SEQ ID NO: 2675 - protein, 20 aa, Artificial Sequence
  Synthetically generated peptide
  VARIANT (1)...(20): Xaa = Any Amino Acid
PGTCXGEICXAYXAACXTGC

SEQ ID NO: 2676 - protein, 20 aa, Artificial Sequence
  Synthetically generated peptide
  VARIANT (1)...(20): Xaa = Any Amino Acid
PGTCXGEICXAYXAACTXGC

SEQ ID NO: 2677 - protein, 20 aa, Artificial Sequence
  Synthetically generated peptide
  VARIANT (1)...(20): Xaa = Any Amino Acid
PGTCXGEICXAYXAACTGXC

SEQ ID NO: 2678 - protein, 20 aa, Artificial Sequence
  Synthetically generated peptide
  VARIANT (1)...(20): Xaa = Any Amino Acid
PGTCXGEICXAYXAACTGCX

SEQ ID NO: 2679 - protein, 19 aa, Artificial Sequence
  Synthetically generated peptide
  VARIANT (1)...(19): Xaa = Any Amino Acid
PGTCXGEICXAYAXACTGC

SEQ ID NO: 2680 - protein, 20 aa, Artificial Sequence
  Synthetically generated peptide
  VARIANT (1)...(20): Xaa = Any Amino Acid
PGTCXGEICXAYAXXACTGC

SEQ ID NO: 2681 - protein, 20 aa, Artificial Sequence
  Synthetically generated peptide
  VARIANT (1)...(20): Xaa = Any Amino Acid
PGTCXGEICXAYAXAXCTGC

SEQ ID NO: 2682 - protein, 20 aa, Artificial Sequence
  Synthetically generated peptide
  VARIANT (1)...(20): Xaa = Any Amino Acid
PGTCXGEICXAYAXACXTGC

SEQ ID NO: 2683 - protein, 20 aa, Artificial Sequence
  Synthetically generated peptide
  VARIANT (1)...(20): Xaa = Any Amino Acid
PGTCXGEICXAYAXACTXGC

SEQ ID NO: 2684 - protein, 20 aa, Artificial Sequence
  Synthetically generated peptide
  VARIANT (1)...(20): Xaa = Any Amino Acid
PGTCXGEICXAYAXACTGXC

SEQ ID NO: 2685 - protein, 20 aa, Artificial Sequence
  Synthetically generated peptide
  VARIANT (1)...(20): Xaa = Any Amino Acid
PGTCXGEICXAYAXACTGCX

SEQ ID NO: 2686 - protein, 19 aa, Artificial Sequence
  Synthetically generated peptide
  VARIANT (1)...(19): Xaa = Any Amino Acid
PGTCXGEICXAYAAXCTGC

SEQ ID NO: 2687 - protein, 20 aa, Artificial Sequence
  Synthetically generated peptide
  VARIANT (1)...(20): Xaa = Any Amino Acid
PGTCXGEICXAYAAXXCTGC

SEQ ID NO: 2688 - protein, 20 aa, Artificial Sequence
  Synthetically generated peptide
  VARIANT (1)...(20): Xaa = Any Amino Acid
PGTCXGEICXAYAAXCXTGC

SEQ ID NO: 2689 - protein, 20 aa, Artificial Sequence
  Synthetically generated peptide
  VARIANT (1)...(20): Xaa = Any Amino Acid
PGTCXGEICXAYAAXCTXGC

SEQ ID NO: 2690 - protein, 20 aa, Artificial Sequence
  Synthetically generated peptide
  VARIANT (1)...(20): Xaa = Any Amino Acid
PGTCXGEICXAYAAXCTGXC

SEQ ID NO: 2691 - protein, 20 aa, Artificial Sequence
  Synthetically generated peptide
  VARIANT (1)...(20): Xaa = Any Amino Acid
PGTCXGEICXAYAAXCTGCX

SEQ ID NO: 2692 - protein, 19 aa, Artificial Sequence
  Synthetically generated peptide
  VARIANT (1)...(19): Xaa = Any Amino Acid
PGTCXGEICXAYAACXTGC

SEQ ID NO: 2693 - protein, 20 aa, Artificial Sequence
  Synthetically generated peptide
  VARIANT (1)...(20): Xaa = Any Amino Acid
PGTCXGEICXAYAACXXTGC

SEQ ID NO: 2694 - protein, 20 aa, Artificial Sequence
  Synthetically generated peptide
  VARIANT (1)...(20): Xaa = Any Amino Acid
PGTCXGEICXAYAACXTXGC

SEQ ID NO: 2695 - protein, 20 aa, Artificial Sequence
  Synthetically generated peptide
  VARIANT (1)...(20): Xaa = Any Amino Acid
PGTCXGEICXAYAACXTGXC

SEQ ID NO: 2696 - protein, 20 aa, Artificial Sequence
  Synthetically generated peptide
  VARIANT (1)...(20): Xaa = Any Amino Acid
PGTCXGEICXAYAACXTGCX

SEQ ID NO: 2697 - protein, 19 aa, Artificial Sequence
  Synthetically generated peptide
  VARIANT (1)...(19): Xaa = Any Amino Acid
PGTCXGEICXAYAACTXGC

SEQ ID NO: 2698 - protein, 20 aa, Artificial Sequence
  Synthetically generated peptide
  VARIANT (1)...(20): Xaa = Any Amino Acid
PGTCXGEICXAYAACTXXGC

SEQ ID NO: 2699 - protein, 20 aa, Artificial Sequence
  Synthetically generated peptide
  VARIANT (1)...(20): Xaa = Any Amino Acid
PGTCXGEICXAYAACTXGXC

SEQ ID NO: 2700 - protein, 20 aa, Artificial Sequence
  Synthetically generated peptide
  VARIANT (1)...(20): Xaa = Any Amino Acid
PGTCXGEICXAYAACTXGCX

SEQ ID NO: 2701 - protein, 19 aa, Artificial Sequence
  Synthetically generated peptide
  VARIANT (1)...(19): Xaa = Any Amino Acid
PGTCXGEICXAYAACTGXC

SEQ ID NO: 2702 - protein, 20 aa, Artificial Sequence
  Synthetically generated peptide
  VARIANT (1)...(20): Xaa = Any Amino Acid
PGTCXGEICXAYAACTGXXC

SEQ ID NO: 2703 - protein, 20 aa, Artificial Sequence
  Synthetically generated peptide
  VARIANT (1)...(20): Xaa = Any Amino Acid
PGTCXGEICXAYAACTGXCX

SEQ ID NO: 2704 - protein, 19 aa, Artificial Sequence
  Synthetically generated peptide
  VARIANT (1)...(19): Xaa = Any Amino Acid
PGTCXGEICXAYAACTGCX

SEQ ID NO: 2705 - protein, 20 aa, Artificial Sequence
  Synthetically generated peptide
  VARIANT (1)...(20): Xaa = Any Amino Acid
PGTCXGEICXAYAACTGCXX

SEQ ID NO: 2706 - protein, 18 aa, Artificial Sequence
  Synthetically generated peptide
  VARIANT (1)...(18): Xaa = Any Amino Acid
PGTCXGEICAXYAACTGC

SEQ ID NO: 2707 - protein, 19 aa, Artificial Sequence
  Synthetically generated peptide
  VARIANT (1)...(19): Xaa = Any Amino Acid
PGTCXGEICAXXYAACTGC

SEQ ID NO: 2708 - protein, 20 aa, Artificial Sequence
  Synthetically generated peptide
  VARIANT (1)...(20): Xaa = Any Amino Acid
PGTCXGEICAXXXYAACTGC

SEQ ID NO: 2709 - protein, 20 aa, Artificial Sequence
  Synthetically generated peptide
  VARIANT (1)...(20): Xaa = Any Amino Acid
PGTCXGEICAXXYXAACTGC

SEQ ID NO: 2710 - protein, 20 aa, Artificial Sequence
  Synthetically generated peptide
  VARIANT (1)...(20): Xaa = Any Amino Acid
PGTCXGEICAXXYAXACTGC

SEQ ID NO: 2711 - protein, 20 aa, Artificial Sequence
  Synthetically generated peptide
  VARIANT (1)...(20): Xaa = Any Amino Acid
PGTCXGEICAXXYAAXCTGC

SEQ ID NO: 2712 - protein, 20 aa, Artificial Sequence
  Synthetically generated peptide
  VARIANT (1)...(20): Xaa = Any Amino Acid
PGTCXGEICAXXYAACXTGC

SEQ ID NO: 2713 - protein, 20 aa, Artificial Sequence
  Synthetically generated peptide
  VARIANT (1)...(20): Xaa = Any Amino Acid
PGTCXGEICAXXYAACTXGC

SEQ ID NO: 2714 - protein, 20 aa, Artificial Sequence
  Synthetically generated peptide
  VARIANT (1)...(20): Xaa = Any Amino Acid
PGTCXGEICAXXYAACTGXC

SEQ ID NO: 2715 - protein, 20 aa, Artificial Sequence
  Synthetically generated peptide
  VARIANT (1)...(20): Xaa = Any Amino Acid
PGTCXGEICAXXYAACTGCX

SEQ ID NO: 2716 - protein, 19 aa, Artificial Sequence
  Synthetically generated peptide
  VARIANT (1)...(19): Xaa = Any Amino Acid
PGTCXGEICAXYXAACTGC

SEQ ID NO: 2717 - protein, 20 aa, Artificial Sequence
  Synthetically generated peptide
  VARIANT (1)...(20): Xaa = Any Amino Acid
PGTCXGEICAXYXXAACTGC

SEQ ID NO: 2718 - protein, 20 aa, Artificial Sequence
  Synthetically generated peptide
  VARIANT (1)...(20): Xaa = Any Amino Acid
PGTCXGEICAXYXAXACTGC

SEQ ID NO: 2719 - protein, 20 aa, Artificial Sequence
  Synthetically generated peptide
  VARIANT (1)...(20): Xaa = Any Amino Acid
PGTCXGEICAXYXAAXCTGC

SEQ ID NO: 2720 - protein, 20 aa, Artificial Sequence
  Synthetically generated peptide
  VARIANT (1)...(20): Xaa = Any Amino Acid
PGTCXGEICAXYXAACXTGC

SEQ ID NO: 2721 - protein, 20 aa, Artificial Sequence
  Synthetically generated peptide
  VARIANT (1)...(20): Xaa = Any Amino Acid
PGTCXGEICAXYXAACTXGC

SEQ ID NO: 2722 - protein, 20 aa, Artificial Sequence
  Synthetically generated peptide
  VARIANT (1)...(20): Xaa = Any Amino Acid
PGTCXGEICAXYXAACTGXC

SEQ ID NO: 2723 - protein, 20 aa, Artificial Sequence
  Synthetically generated peptide
  VARIANT (1)...(20): Xaa = Any Amino Acid
PGTCXGEICAXYXAACTGCX

SEQ ID NO: 2724 - protein, 19 aa, Artificial Sequence
  Synthetically generated peptide
  VARIANT (1)...(19): Xaa = Any Amino Acid
PGTCXGEICAXYAXACTGC

SEQ ID NO: 2725 - protein, 20 aa, Artificial Sequence
  Synthetically generated peptide
  VARIANT (1)...(20): Xaa = Any Amino Acid
PGTCXGEICAXYAXXACTGC

SEQ ID NO: 2726 - protein, 20 aa, Artificial Sequence
  Synthetically generated peptide
  VARIANT (1)...(20): Xaa = Any Amino Acid
PGTCXGEICAXYAXAXCTGC

SEQ ID NO: 2727 - protein, 20 aa, Artificial Sequence
  Synthetically generated peptide
  VARIANT (1)...(20): Xaa = Any Amino Acid
PGTCXGEICAXYAXACXTGC

SEQ ID NO: 2728 - protein, 20 aa, Artificial Sequence
  Synthetically generated peptide
  VARIANT (1)...(20): Xaa = Any Amino Acid
PGTCXGEICAXYAXACTXGC

SEQ ID NO: 2729 - protein, 20 aa, Artificial Sequence
  Synthetically generated peptide
  VARIANT (1)...(20): Xaa = Any Amino Acid
PGTCXGEICAXYAXACTGXC

SEQ ID NO: 2730 - protein, 20 aa, Artificial Sequence
  Synthetically generated peptide
  VARIANT (1)...(20): Xaa = Any Amino Acid
PGTCXGEICAXYAXACTGCX

SEQ ID NO: 2731 - protein, 19 aa, Artificial Sequence
  Synthetically generated peptide
  VARIANT (1)...(19): Xaa = Any Amino Acid
PGTCXGEICAXYAAXCTGC

SEQ ID NO: 2732 - protein, 20 aa, Artificial Sequence
  Synthetically generated peptide
  VARIANT (1)...(20): Xaa = Any Amino Acid
PGTCXGEICAXYAAXXCTGC

SEQ ID NO: 2733 - protein, 20 aa, Artificial Sequence
  Synthetically generated peptide
  VARIANT (1)...(20): Xaa = Any Amino Acid
PGTCXGEICAXYAAXCXTGC

SEQ ID NO: 2734 - protein, 20 aa, Artificial Sequence
  Synthetically generated peptide
  VARIANT (1)...(20): Xaa = Any Amino Acid
PGTCXGEICAXYAAXCTXGC

SEQ ID NO: 2735 - protein, 20 aa, Artificial Sequence
  Synthetically generated peptide
  VARIANT (1)...(20): Xaa = Any Amino Acid
PGTCXGEICAXYAAXCTGXC

SEQ ID NO: 2736 - protein, 20 aa, Artificial Sequence
  Synthetically generated peptide
  VARIANT (1)...(20): Xaa = Any Amino Acid
PGTCXGEICAXYAAXCTGCX

SEQ ID NO: 2737 - protein, 19 aa, Artificial Sequence
  Synthetically generated peptide
  VARIANT (1)...(19): Xaa = Any Amino Acid
PGTCXGEICAXYAACXTGC

SEQ ID NO: 2738 - protein, 20 aa, Artificial Sequence
  Synthetically generated peptide
  VARIANT (1)...(20): Xaa = Any Amino Acid
PGTCXGEICAXYAACXXTGC

SEQ ID NO: 2739 - protein, 20 aa, Artificial Sequence
  Synthetically generated peptide
  VARIANT (1)...(20): Xaa = Any Amino Acid
PGTCXGEICAXYAACXTXGC

SEQ ID NO: 2740 - protein, 20 aa, Artificial Sequence
  Synthetically generated peptide
  VARIANT (1)...(20): Xaa = Any Amino Acid
PGTCXGEICAXYAACXTGXC

SEQ ID NO: 2741 - protein, 20 aa, Artificial Sequence
  Synthetically generated peptide
  VARIANT (1)...(20): Xaa = Any Amino Acid
PGTCXGEICAXYAACXTGCX

SEQ ID NO: 2742 - protein, 19 aa, Artificial Sequence
  Synthetically generated peptide
  VARIANT (1)...(19): Xaa = Any Amino Acid
PGTCXGEICAXYAACTXGC

SEQ ID NO: 2743 - protein, 20 aa, Artificial Sequence
  Synthetically generated peptide
  VARIANT (1)...(20): Xaa = Any Amino Acid
PGTCXGEICAXYAACTXXGC

SEQ ID NO: 2744 - protein, 20 aa, Artificial Sequence
  Synthetically generated peptide
  VARIANT (1)...(20): Xaa = Any Amino Acid
PGTCXGEICAXYAACTXGXC

SEQ ID NO: 2745 - protein, 20 aa, Artificial Sequence
  Synthetically generated peptide
  VARIANT (1)...(20): Xaa = Any Amino Acid
PGTCXGEICAXYAACTXGCX

SEQ ID NO: 2746 - protein, 19 aa, Artificial Sequence
  Synthetically generated peptide
  VARIANT (1)...(19): Xaa = Any Amino Acid
PGTCXGEICAXYAACTGXC

SEQ ID NO: 2747 - protein, 20 aa, Artificial Sequence
  Synthetically generated peptide
  VARIANT (1)...(20): Xaa = Any Amino Acid
PGTCXGEICAXYAACTGXXC

SEQ ID NO: 2748 - protein, 20 aa, Artificial Sequence
  Synthetically generated peptide
  VARIANT (1)...(20): Xaa = Any Amino Acid
PGTCXGEICAXYAACTGXCX

SEQ ID NO: 2749 - protein, 19 aa, Artificial Sequence
  Synthetically generated peptide
  VARIANT (1)...(19): Xaa = Any Amino Acid
PGTCXGEICAXYAACTGCX

SEQ ID NO: 2750 - protein, 20 aa, Artificial Sequence
  Synthetically generated peptide
  VARIANT (1)...(20): Xaa = Any Amino Acid
PGTCXGEICAXYAACTGCXX

SEQ ID NO: 2751 - protein, 18 aa, Artificial Sequence
  Synthetically generated peptide
  VARIANT (1)...(18): Xaa = Any Amino Acid
PGTCXGEICAYXAACTGC

SEQ ID NO: 2752 - protein, 19 aa, Artificial Sequence
  Synthetically generated peptide
  VARIANT (1)...(19): Xaa = Any Amino Acid
PGTCXGEICAYXXAACTGC

SEQ ID NO: 2753 - protein, 20 aa, Artificial Sequence
  Synthetically generated peptide
  VARIANT (1)...(20): Xaa = Any Amino Acid
PGTCXGEICAYXXXAACTGC

SEQ ID NO: 2754 - protein, 20 aa, Artificial Sequence
  Synthetically generated peptide
  VARIANT (1)...(20): Xaa = Any Amino Acid
PGTCXGEICAYXXAXACTGC

SEQ ID NO: 2755 - protein, 20 aa, Artificial Sequence
  Synthetically generated peptide
  VARIANT (1)...(20): Xaa = Any Amino Acid
PGTCXGEICAYXXAAXCTGC

SEQ ID NO: 2756 - protein, 20 aa, Artificial Sequence
  Synthetically generated peptide
  VARIANT (1)...(20): Xaa = Any Amino Acid
PGTCXGEICAYXXAACXTGC

SEQ ID NO: 2757 - protein, 20 aa, Artificial Sequence
  Synthetically generated peptide
  VARIANT (1)...(20): Xaa = Any Amino Acid
PGTCXGEICAYXXAACTXGC

SEQ ID NO: 2758 - protein, 20 aa, Artificial Sequence
  Synthetically generated peptide
  VARIANT (1)...(20): Xaa = Any Amino Acid
PGTCXGEICAYXXAACTGXC

SEQ ID NO: 2759 - protein, 20 aa, Artificial Sequence
  Synthetically generated peptide
  VARIANT (1)...(20): Xaa = Any Amino Acid
PGTCXGEICAYXXAACTGCX

SEQ ID NO: 2760 - protein, 19 aa, Artificial Sequence
  Synthetically generated peptide
  VARIANT (1)...(19): Xaa = Any Amino Acid
PGTCXGEICAYXAXACTGC

SEQ ID NO: 2761 - protein, 20 aa, Artificial Sequence
  Synthetically generated peptide
  VARIANT (1)...(20): Xaa = Any Amino Acid
PGTCXGEICAYXAXXACTGC

SEQ ID NO: 2762 - protein, 20 aa, Artificial Sequence
  Synthetically generated peptide
  VARIANT (1)...(20): Xaa = Any Amino Acid
PGTCXGEICAYXAXAXCTGC

SEQ ID NO: 2763 - protein, 20 aa, Artificial Sequence
  Synthetically generated peptide
  VARIANT (1)...(20): Xaa = Any Amino Acid
PGTCXGEICAYXAXACXTGC

SEQ ID NO: 2764 - protein, 20 aa, Artificial Sequence
  Synthetically generated peptide
  VARIANT (1)...(20): Xaa = Any Amino Acid
PGTCXGEICAYXAXACTXGC

SEQ ID NO: 2765 - protein, 20 aa, Artificial Sequence
  Synthetically generated peptide
  VARIANT (1)...(20): Xaa = Any Amino Acid
PGTCXGEICAYXAXACTGXC

SEQ ID NO: 2766 - protein, 20 aa, Artificial Sequence
  Synthetically generated peptide
  VARIANT (1)...(20): Xaa = Any Amino Acid
PGTCXGEICAYXAXACTGCX

SEQ ID NO: 2767 - protein, 19 aa, Artificial Sequence
  Synthetically generated peptide
  VARIANT (1)...(19): Xaa = Any Amino Acid
PGTCXGEICAYXAAXCTGC

SEQ ID NO: 2768 - protein, 20 aa, Artificial Sequence
  Synthetically generated peptide
  VARIANT (1)...(20): Xaa = Any Amino Acid
PGTCXGEICAYXAAXXCTGC

SEQ ID NO: 2769 - protein, 20 aa, Artificial Sequence
  Synthetically generated peptide
  VARIANT (1)...(20): Xaa = Any Amino Acid
PGTCXGEICAYXAAXCXTGC

SEQ ID NO: 2770 - protein, 20 aa, Artificial Sequence
  Synthetically generated peptide
  VARIANT (1)...(20): Xaa = Any Amino Acid
PGTCXGEICAYXAAXCTXGC

SEQ ID NO: 2771 - protein, 20 aa, Artificial Sequence
  Synthetically generated peptide
  VARIANT (1)...(20): Xaa = Any Amino Acid
PGTCXGEICAYXAAXCTGXC

SEQ ID NO: 2772 - protein, 20 aa, Artificial Sequence
  Synthetically generated peptide
  VARIANT (1)...(20): Xaa = Any Amino Acid
PGTCXGEICAYXAAXCTGCX

SEQ ID NO: 2773 - protein, 19 aa, Artificial Sequence
  Synthetically generated peptide
  VARIANT (1)...(19): Xaa = Any Amino Acid
PGTCXGEICAYXAACXTGC

SEQ ID NO: 2774 - protein, 20 aa, Artificial Sequence
  Synthetically generated peptide
  VARIANT (1)...(20): Xaa = Any Amino Acid
PGTCXGEICAYXAACXXTGC

SEQ ID NO: 2775 - protein, 20 aa, Artificial Sequence
  Synthetically generated peptide
  VARIANT (1)...(20): Xaa = Any Amino Acid
PGTCXGEICAYXAACXTXGC

SEQ ID NO: 2776 - protein, 20 aa, Artificial Sequence
  Synthetically generated peptide
  VARIANT (1)...(20): Xaa = Any Amino Acid
PGTCXGEICAYXAACXTGXC

SEQ ID NO: 2777 - protein, 20 aa, Artificial Sequence
  Synthetically generated peptide
  VARIANT (1)...(20): Xaa = Any Amino Acid
PGTCXGEICAYXAACXTGCX

SEQ ID NO: 2778 - protein, 19 aa, Artificial Sequence
  Synthetically generated peptide
  VARIANT (1)...(19): Xaa = Any Amino Acid
PGTCXGEICAYXAACTXGC

SEQ ID NO: 2779 - protein, 20 aa, Artificial Sequence
  Synthetically generated peptide
  VARIANT (1)...(20): Xaa = Any Amino Acid
PGTCXGEICAYXAACTXXGC

SEQ ID NO: 2780 - protein, 20 aa, Artificial Sequence
  Synthetically generated peptide
  VARIANT (1)...(20): Xaa = Any Amino Acid
PGTCXGEICAYXAACTXGXC

SEQ ID NO: 2781 - protein, 20 aa, Artificial Sequence
  Synthetically generated peptide
  VARIANT (1)...(20): Xaa = Any Amino Acid
PGTCXGEICAYXAACTXGCX

SEQ ID NO: 2782 - protein, 19 aa, Artificial Sequence
  Synthetically generated peptide
  VARIANT (1)...(19): Xaa = Any Amino Acid
PGTCXGEICAYXAACTGXC

SEQ ID NO: 2783 - protein, 20 aa, Artificial Sequence
  Synthetically generated peptide
  VARIANT (1)...(20): Xaa = Any Amino Acid
PGTCXGEICAYXAACTGXXC

SEQ ID NO: 2784 - protein, 20 aa, Artificial Sequence
  Synthetically generated peptide
  VARIANT (1)...(20): Xaa = Any Amino Acid
PGTCXGEICAYXAACTGXCX

SEQ ID NO: 2785 - protein, 19 aa, Artificial Sequence
  Synthetically generated peptide
  VARIANT (1)...(19): Xaa = Any Amino Acid
PGTCXGEICAYXAACTGCX

SEQ ID NO: 2786 - protein, 20 aa, Artificial Sequence
  Synthetically generated peptide
  VARIANT (1)...(20): Xaa = Any Amino Acid
PGTCXGEICAYXAACTGCXX

SEQ ID NO: 2787 - protein, 18 aa, Artificial Sequence
  Synthetically generated peptide
  VARIANT (1)...(18): Xaa = Any Amino Acid
PGTCXGEICAYAXACTGC

SEQ ID NO: 2788 - protein, 19 aa, Artificial Sequence
  Synthetically generated peptide
  VARIANT (1)...(19): Xaa = Any Amino Acid
PGTCXGEICAYAXXACTGC

SEQ ID NO: 2789 - protein, 20 aa, Artificial Sequence
  Synthetically generated peptide
  VARIANT (1)...(20): Xaa = Any Amino Acid
PGTCXGEICAYAXXXACTGC

SEQ ID NO: 2790 - protein, 20 aa, Artificial Sequence
  Synthetically generated peptide
  VARIANT (1)...(20): Xaa = Any Amino Acid
PGTCXGEICAYAXXAXCTGC

SEQ ID NO: 2791 - protein, 20 aa, Artificial Sequence
  Synthetically generated peptide
  VARIANT (1)...(20): Xaa = Any Amino Acid
PGTCXGEICAYAXXACXTGC

SEQ ID NO: 2792 - protein, 20 aa, Artificial Sequence
  Synthetically generated peptide
  VARIANT (1)...(20): Xaa = Any Amino Acid
PGTCXGEICAYAXXACTXGC

SEQ ID NO: 2793 - protein, 20 aa, Artificial Sequence
  Synthetically generated peptide
  VARIANT (1)...(20): Xaa = Any Amino Acid
PGTCXGEICAYAXXACTGXC

SEQ ID NO: 2794 - protein, 20 aa, Artificial Sequence
  Synthetically generated peptide
  VARIANT (1)...(20): Xaa = Any Amino Acid
PGTCXGEICAYAXXACTGCX

SEQ ID NO: 2795 - protein, 19 aa, Artificial Sequence
  Synthetically generated peptide
  VARIANT (1)...(19): Xaa = Any Amino Acid
PGTCXGEICAYAXAXCTGC

SEQ ID NO: 2796 - protein, 20 aa, Artificial Sequence
  Synthetically generated peptide
  VARIANT (1)...(20): Xaa = Any Amino Acid
PGTCXGEICAYAXAXXCTGC

SEQ ID NO: 2797 - protein, 20 aa, Artificial Sequence
  Synthetically generated peptide
  VARIANT (1)...(20): Xaa = Any Amino Acid
PGTCXGEICAYAXAXCXTGC

SEQ ID NO: 2798 - protein, 20 aa, Artificial Sequence
  Synthetically generated peptide
  VARIANT (1)...(20): Xaa = Any Amino Acid
PGTCXGEICAYAXAXCTXGC

SEQ ID NO: 2799 - protein, 20 aa, Artificial Sequence
  Synthetically generated peptide
  VARIANT (1)...(20): Xaa = Any Amino Acid
PGTCXGEICAYAXAXCTGXC

SEQ ID NO: 2800 - protein, 20 aa, Artificial Sequence
  Synthetically generated peptide
  VARIANT (1)...(20): Xaa = Any Amino Acid
PGTCXGEICAYAXAXCTGCX

SEQ ID NO: 2801 - protein, 19 aa, Artificial Sequence
  Synthetically generated peptide
  VARIANT (1)...(19): Xaa = Any Amino Acid
PGTCXGEICAYAXACXTGC

SEQ ID NO: 2802 - protein, 20 aa, Artificial Sequence
  Synthetically generated peptide
  VARIANT (1)...(20): Xaa = Any Amino Acid
PGTCXGEICAYAXACXXTGC

SEQ ID NO: 2803 - protein, 20 aa, Artificial Sequence
  Synthetically generated peptide
  VARIANT (1)...(20): Xaa = Any Amino Acid
PGTCXGEICAYAXACXTXGC

SEQ ID NO: 2804 - protein, 20 aa, Artificial Sequence
  Synthetically generated peptide
  VARIANT (1)...(20): Xaa = Any Amino Acid
PGTCXGEICAYAXACXTGXC

SEQ ID NO: 2805 - protein, 20 aa, Artificial Sequence
  Synthetically generated peptide
  VARIANT (1)...(20): Xaa = Any Amino Acid
PGTCXGEICAYAXACXTGCX

SEQ ID NO: 2806 - protein, 19 aa, Artificial Sequence
  Synthetically generated peptide
  VARIANT (1)...(19): Xaa = Any Amino Acid
PGTCXGEICAYAXACTXGC

SEQ ID NO: 2807 - protein, 20 aa, Artificial Sequence
  Synthetically generated peptide
  VARIANT (1)...(20): Xaa = Any Amino Acid
PGTCXGEICAYAXACTXXGC

SEQ ID NO: 2808 - protein, 20 aa, Artificial Sequence
  Synthetically generated peptide
  VARIANT (1)...(20): Xaa = Any Amino Acid
PGTCXGEICAYAXACTXGXC

SEQ ID NO: 2809 - protein, 20 aa, Artificial Sequence
  Synthetically generated peptide
  VARIANT (1)...(20): Xaa = Any Amino Acid
PGTCXGEICAYAXACTXGCX

SEQ ID NO: 2810 - protein, 19 aa, Artificial Sequence
  Synthetically generated peptide
  VARIANT (1)...(19): Xaa = Any Amino Acid
PGTCXGEICAYAXACTGXC

SEQ ID NO: 2811 - protein, 20 aa, Artificial Sequence
  Synthetically generated peptide
  VARIANT (1)...(20): Xaa = Any Amino Acid
PGTCXGEICAYAXACTGXXC

SEQ ID NO: 2812 - protein, 20 aa, Artificial Sequence
  Synthetically generated peptide
  VARIANT (1)...(20): Xaa = Any Amino Acid
PGTCXGEICAYAXACTGXCX

SEQ ID NO: 2813 - protein, 19 aa, Artificial Sequence
  Synthetically generated peptide
  VARIANT (1)...(19): Xaa = Any Amino Acid
PGTCXGEICAYAXACTGCX

SEQ ID NO: 2814 - protein, 20 aa, Artificial Sequence
  Synthetically generated peptide
  VARIANT (1)...(20): Xaa = Any Amino Acid
PGTCXGEICAYAXACTGCXX

SEQ ID NO: 2815 - protein, 18 aa, Artificial Sequence
  Synthetically generated peptide
  VARIANT (1)...(18): Xaa = Any Amino Acid
PGTCXGEICAYAAXCTGC

SEQ ID NO: 2816 - protein, 19 aa, Artificial Sequence
  Synthetically generated peptide
  VARIANT (1)...(19): Xaa = Any Amino Acid
PGTCXGEICAYAAXXCTGC

SEQ ID NO: 2817 - protein, 20 aa, Artificial Sequence
  Synthetically generated peptide
  VARIANT (1)...(20): Xaa = Any Amino Acid
PGTCXGEICAYAAXXXCTGC

SEQ ID NO: 2818 - protein, 20 aa, Artificial Sequence
  Synthetically generated peptide
  VARIANT (1)...(20): Xaa = Any Amino Acid
PGTCXGEICAYAAXXCXTGC

SEQ ID NO: 2819 - protein, 20 aa, Artificial Sequence
  Synthetically generated peptide
  VARIANT (1)...(20): Xaa = Any Amino Acid
PGTCXGEICAYAAXXCTXGC

SEQ ID NO: 2820 - protein, 20 aa, Artificial Sequence
  Synthetically generated peptide
  VARIANT (1)...(20): Xaa = Any Amino Acid
PGTCXGEICAYAAXXCTGXC

SEQ ID NO: 2821 - protein, 20 aa, Artificial Sequence
  Synthetically generated peptide
  VARIANT (1)...(20): Xaa = Any Amino Acid
PGTCXGEICAYAAXXCTGCX

SEQ ID NO: 2822 - protein, 19 aa, Artificial Sequence
  Synthetically generated peptide
  VARIANT (1)...(19): Xaa = Any Amino Acid
PGTCXGEICAYAAXCXTGC

SEQ ID NO: 2823 - protein, 20 aa, Artificial Sequence
  Synthetically generated peptide
  VARIANT (1)...(20): Xaa = Any Amino Acid
PGTCXGEICAYAAXCXXTGC

SEQ ID NO: 2824 - protein, 20 aa, Artificial Sequence
  Synthetically generated peptide
  VARIANT (1)...(20): Xaa = Any Amino Acid
PGTCXGEICAYAAXCXTXGC

SEQ ID NO: 2825 - protein, 20 aa, Artificial Sequence
  Synthetically generated peptide
  VARIANT (1)...(20): Xaa = Any Amino Acid
PGTCXGEICAYAAXCXTGXC

SEQ ID NO: 2826 - protein, 20 aa, Artificial Sequence
  Synthetically generated peptide
  VARIANT (1)...(20): Xaa = Any Amino Acid
PGTCXGEICAYAAXCXTGCX

SEQ ID NO: 2827 - protein, 19 aa, Artificial Sequence
  Synthetically generated peptide
  VARIANT (1)...(19): Xaa = Any Amino Acid
PGTCXGEICAYAAXCTXGC

SEQ ID NO: 2828 - protein, 20 aa, Artificial Sequence
  Synthetically generated peptide
  VARIANT (1)...(20): Xaa = Any Amino Acid
PGTCXGEICAYAAXCTXXGC

SEQ ID NO: 2829 - protein, 20 aa, Artificial Sequence
  Synthetically generated peptide
  VARIANT (1)...(20): Xaa = Any Amino Acid
PGTCXGEICAYAAXCTXGXC

SEQ ID NO: 2830 - protein, 20 aa, Artificial Sequence
  Synthetically generated peptide
  VARIANT (1)...(20): Xaa = Any Amino Acid
PGTCXGEICAYAAXCTXGCX

SEQ ID NO: 2831 - protein, 19 aa, Artificial Sequence
  Synthetically generated peptide
  VARIANT (1)...(19): Xaa = Any Amino Acid
PGTCXGEICAYAAXCTGXC

SEQ ID NO: 2832 - protein, 20 aa, Artificial Sequence
  Synthetically generated peptide
  VARIANT (1)...(20): Xaa = Any Amino Acid
PGTCXGEICAYAAXCTGXXC

SEQ ID NO: 2833 - protein, 20 aa, Artificial Sequence
  Synthetically generated peptide
  VARIANT (1)...(20): Xaa = Any Amino Acid
PGTCXGEICAYAAXCTGXCX

SEQ ID NO: 2834 - protein, 19 aa, Artificial Sequence
  Synthetically generated peptide
  VARIANT (1)...(19): Xaa = Any Amino Acid
PGTCXGEICAYAAXCTGCX

SEQ ID NO: 2835 - protein, 20 aa, Artificial Sequence
  Synthetically generated peptide
  VARIANT (1)...(20): Xaa = Any Amino Acid
PGTCXGEICAYAAXCTGCXX

SEQ ID NO: 2836 - protein, 18 aa, Artificial Sequence
  Synthetically generated peptide
  VARIANT (1)...(18): Xaa = Any Amino Acid
PGTCXGEICAYAACXTGC

SEQ ID NO: 2837 - protein, 19 aa, Artificial Sequence
  Synthetically generated peptide
  VARIANT (1)...(19): Xaa = Any Amino Acid
PGTCXGEICAYAACXXTGC

SEQ ID NO: 2838 - protein, 20 aa, Artificial Sequence
  Synthetically generated peptide
  VARIANT (1)...(20): Xaa = Any Amino Acid
PGTCXGEICAYAACXXXTGC

SEQ ID NO: 2839 - protein, 20 aa, Artificial Sequence
  Synthetically generated peptide
  VARIANT (1)...(20): Xaa = Any Amino Acid
PGTCXGEICAYAACXXTXGC

SEQ ID NO: 2840 - protein, 20 aa, Artificial Sequence
  Synthetically generated peptide
  VARIANT (1)...(20): Xaa = Any Amino Acid
PGTCXGEICAYAACXXTGXC

SEQ ID NO: 2841 - protein, 20 aa, Artificial Sequence
  Synthetically generated peptide
  VARIANT (1)...(20): Xaa = Any Amino Acid
PGTCXGEICAYAACXXTGCX

SEQ ID NO: 2842 - protein, 19 aa, Artificial Sequence
  Synthetically generated peptide
  VARIANT (1)...(19): Xaa = Any Amino Acid
PGTCXGEICAYAACXTXGC

SEQ ID NO: 2843 - protein, 20 aa, Artificial Sequence
  Synthetically generated peptide
  VARIANT (1)...(20): Xaa = Any Amino Acid
PGTCXGEICAYAACXTXXGC

SEQ ID NO: 2844 - protein, 20 aa, Artificial Sequence
  Synthetically generated peptide
  VARIANT (1)...(20): Xaa = Any Amino Acid
PGTCXGEICAYAACXTXGXC

SEQ ID NO: 2845 - protein, 20 aa, Artificial Sequence
  Synthetically generated peptide
  VARIANT (1)...(20): Xaa = Any Amino Acid
PGTCXGEICAYAACXTXGCX

SEQ ID NO: 2846 - protein, 19 aa, Artificial Sequence
  Synthetically generated peptide
  VARIANT (1)...(19): Xaa = Any Amino Acid
PGTCXGEICAYAACXTGXC

SEQ ID NO: 2847 - protein, 20 aa, Artificial Sequence
  Synthetically generated peptide
  VARIANT (1)...(20): Xaa = Any Amino Acid
PGTCXGEICAYAACXTGXXC

SEQ ID NO: 2848 - protein, 20 aa, Artificial Sequence
  Synthetically generated peptide
  VARIANT (1)...(20): Xaa = Any Amino Acid
PGTCXGEICAYAACXTGXCX

SEQ ID NO: 2849 - protein, 19 aa, Artificial Sequence
  Synthetically generated peptide
  VARIANT (1)...(19): Xaa = Any Amino Acid
PGTCXGEICAYAACXTGCX

SEQ ID NO: 2850 - protein, 20 aa, Artificial Sequence
  Synthetically generated peptide
  VARIANT (1)...(20): Xaa = Any Amino Acid
PGTCXGEICAYAACXTGCXX

SEQ ID NO: 2851 - protein, 18 aa, Artificial Sequence
  Synthetically generated peptide
  VARIANT (1)...(18): Xaa = Any Amino Acid
PGTCXGEICAYAACTXGC

SEQ ID NO: 2852 - protein, 19 aa, Artificial Sequence
  Synthetically generated peptide
  VARIANT (1)...(19): Xaa = Any Amino Acid
PGTCXGEICAYAACTXXGC

SEQ ID NO: 2853 - protein, 20 aa, Artificial Sequence
  Synthetically generated peptide
  VARIANT (1)...(20): Xaa = Any Amino Acid
PGTCXGEICAYAACTXXXGC

SEQ ID NO: 2854 - protein, 20 aa, Artificial Sequence
  Synthetically generated peptide
  VARIANT (1)...(20): Xaa = Any Amino Acid
PGTCXGEICAYAACTXXGXC

SEQ ID NO: 2855 - protein, 20 aa, Artificial Sequence
  Synthetically generated peptide
  VARIANT (1)...(20): Xaa = Any Amino Acid
PGTCXGEICAYAACTXXGCX

SEQ ID NO: 2856 - protein, 19 aa, Artificial Sequence
  Synthetically generated peptide
  VARIANT (1)...(19): Xaa = Any Amino Acid
PGTCXGEICAYAACTXGXC

SEQ ID NO: 2857 - protein, 20 aa, Artificial Sequence
  Synthetically generated peptide
  VARIANT (1)...(20): Xaa = Any Amino Acid
PGTCXGEICAYAACTXGXXC

SEQ ID NO: 2858 - protein, 20 aa, Artificial Sequence
  Synthetically generated peptide
  VARIANT (1)...(20): Xaa = Any Amino Acid
PGTCXGEICAYAACTXGXCX

SEQ ID NO: 2859 - protein, 19 aa, Artificial Sequence
  Synthetically generated peptide
  VARIANT (1)...(19): Xaa = Any Amino Acid
PGTCXGEICAYAACTXGCX

SEQ ID NO: 2860 - protein, 20 aa, Artificial Sequence
  Synthetically generated peptide
  VARIANT (1)...(20): Xaa = Any Amino Acid
PGTCXGEICAYAACTXGCXX

SEQ ID NO: 2861 - protein, 18 aa, Artificial Sequence
  Synthetically generated peptide
  VARIANT (1)...(18): Xaa = Any Amino Acid
PGTCXGEICAYAACTGXC

SEQ ID NO: 2862 - protein, 19 aa, Artificial Sequence
  Synthetically generated peptide
  VARIANT (1)...(19): Xaa = Any Amino Acid
PGTCXGEICAYAACTGXXC

SEQ ID NO: 2863 - protein, 20 aa, Artificial Sequence
  Synthetically generated peptide
  VARIANT (1)...(20): Xaa = Any Amino Acid
PGTCXGEICAYAACTGXXXC

SEQ ID NO: 2864 - protein, 20 aa, Artificial Sequence
  Synthetically generated peptide
  VARIANT (1)...(20): Xaa = Any Amino Acid
PGTCXGEICAYAACTGXXCX

SEQ ID NO: 2865 - protein, 19 aa, Artificial Sequence
  Synthetically generated peptide
  VARIANT (1)...(19): Xaa = Any Amino Acid
PGTCXGEICAYAACTGXCX

SEQ ID NO: 2866 - protein, 20 aa, Artificial Sequence
  Synthetically generated peptide
  VARIANT (1)...(20): Xaa = Any Amino Acid
PGTCXGEICAYAACTGXCXX

SEQ ID NO: 2867 - protein, 18 aa, Artificial Sequence
  Synthetically generated peptide
  VARIANT (1)...(18): Xaa = Any Amino Acid
PGTCXGEICAYAACTGCX

SEQ ID NO: 2868 - protein, 19 aa, Artificial Sequence
  Synthetically generated peptide
  VARIANT (1)...(19): Xaa = Any Amino Acid
PGTCXGEICAYAACTGCXX

SEQ ID NO: 2869 - protein, 20 aa, Artificial Sequence
  Synthetically generated peptide
  VARIANT (1)...(20): Xaa = Any Amino Acid
PGTCXGEICAYAACTGCXXX

SEQ ID NO: 2870 - protein, 17 aa, Artificial Sequence
  Synthetically generated peptide
  VARIANT (1)...(17): Xaa = Any Amino Acid
PGTCGXEICAYAACTGC

SEQ ID NO: 2871 - protein, 18 aa, Artificial Sequence
  Synthetically generated peptide
  VARIANT (1)...(18): Xaa = Any Amino Acid
PGTCGXXEICAYAACTGC

SEQ ID NO: 2872 - protein, 19 aa, Artificial Sequence
  Synthetically generated peptide
  VARIANT (1)...(19): Xaa = Any Amino Acid
PGTCGXXXEICAYAACTGC

SEQ ID NO: 2873 - protein, 20 aa, Artificial Sequence
  Synthetically generated peptide
  VARIANT (1)...(20): Xaa = Any Amino Acid
PGTCGXXXXEICAYAACTGC

SEQ ID NO: 2874 - protein, 20 aa, Artificial Sequence
  Synthetically generated peptide
  VARIANT (1)...(20): Xaa = Any Amino Acid
PGTCGXXXEXICAYAACTGC

SEQ ID NO: 2875 - protein, 20 aa, Artificial Sequence
  Synthetically generated peptide
  VARIANT (1)...(20): Xaa = Any Amino Acid
PGTCGXXXEIXCAYAACTGC

SEQ ID NO: 2876 - protein, 20 aa, Artificial Sequence
  Synthetically generated peptide
  VARIANT (1)...(20): Xaa = Any Amino Acid
PGTCGXXXEICXAYAACTGC

SEQ ID NO: 2877 - protein, 20 aa, Artificial Sequence
  Synthetically generated peptide
  VARIANT (1)...(20): Xaa = Any Amino Acid
PGTCGXXXEICAXYAACTGC

SEQ ID NO: 2878 - protein, 20 aa, Artificial Sequence
  Synthetically generated peptide
  VARIANT (1)...(20): Xaa = Any Amino Acid
PGTCGXXXEICAYXAACTGC

SEQ ID NO: 2879 - protein, 20 aa, Artificial Sequence
  Synthetically generated peptide
  VARIANT (1)...(20): Xaa = Any Amino Acid
PGTCGXXXEICAYAXACTGC

SEQ ID NO: 2880 - protein, 20 aa, Artificial Sequence
  Synthetically generated peptide
  VARIANT (1)...(20): Xaa = Any Amino Acid
PGTCGXXXEICAYAAXCTGC

SEQ ID NO: 2881 - protein, 20 aa, Artificial Sequence
  Synthetically generated peptide
  VARIANT (1)...(20): Xaa = Any Amino Acid
PGTCGXXXEICAYAACXTGC

SEQ ID NO: 2882 - protein, 20 aa, Artificial Sequence
  Synthetically generated peptide
  VARIANT (1)...(20): Xaa = Any Amino Acid
PGTCGXXXEICAYAACTXGC

SEQ ID NO: 2883 - protein, 20 aa, Artificial Sequence
  Synthetically generated peptide
  VARIANT (1)...(20): Xaa = Any Amino Acid
PGTCGXXXEICAYAACTGXC

SEQ ID NO: 2884 - protein, 20 aa, Artificial Sequence
  Synthetically generated peptide
  VARIANT (1)...(20): Xaa = Any Amino Acid
PGTCGXXXEICAYAACTGCX

SEQ ID NO: 2885 - protein, 19 aa, Artificial Sequence
  Synthetically generated peptide
  VARIANT (1)...(19): Xaa = Any Amino Acid
PGTCGXXEXICAYAACTGC

SEQ ID NO: 2886 - protein, 20 aa, Artificial Sequence
  Synthetically generated peptide
  VARIANT (1)...(20): Xaa = Any Amino Acid
PGTCGXXEXXICAYAACTGC

SEQ ID NO: 2887 - protein, 20 aa, Artificial Sequence
  Synthetically generated peptide
  VARIANT (1)...(20): Xaa = Any Amino Acid
PGTCGXXEXIXCAYAACTGC

SEQ ID NO: 2888 - protein, 20 aa, Artificial Sequence
  Synthetically generated peptide
  VARIANT (1)...(20): Xaa = Any Amino Acid
PGTCGXXEXICXAYAACTGC

SEQ ID NO: 2889 - protein, 20 aa, Artificial Sequence
  Synthetically generated peptide
  VARIANT (1)...(20): Xaa = Any Amino Acid
PGTCGXXEXICAXYAACTGC

SEQ ID NO: 2890 - protein, 20 aa, Artificial Sequence
  Synthetically generated peptide
  VARIANT (1)...(20): Xaa = Any Amino Acid
PGTCGXXEXICAYXAACTGC

SEQ ID NO: 2891 - protein, 20 aa, Artificial Sequence
  Synthetically generated peptide
  VARIANT (1)...(20): Xaa = Any Amino Acid
PGTCGXXEXICAYAXACTGC

SEQ ID NO: 2892 - protein, 20 aa, Artificial Sequence
  Synthetically generated peptide
  VARIANT (1)...(20): Xaa = Any Amino Acid
PGTCGXXEXICAYAAXCTGC

SEQ ID NO: 2893 - protein, 20 aa, Artificial Sequence
  Synthetically generated peptide
  VARIANT (1)...(20): Xaa = Any Amino Acid
PGTCGXXEXICAYAACXTGC

SEQ ID NO: 2894 - protein, 20 aa, Artificial Sequence
  Synthetically generated peptide
  VARIANT (1)...(20): Xaa = Any Amino Acid
PGTCGXXEXICAYAACTXGC

SEQ ID NO: 2895 - protein, 20 aa, Artificial Sequence
  Synthetically generated peptide
  VARIANT (1)...(20): Xaa = Any Amino Acid
PGTCGXXEXICAYAACTGXC

SEQ ID NO: 2896 - protein, 20 aa, Artificial Sequence
  Synthetically generated peptide
  VARIANT (1)...(20): Xaa = Any Amino Acid
PGTCGXXEXICAYAACTGCX

SEQ ID NO: 2897 - protein, 19 aa, Artificial Sequence
  Synthetically generated peptide
  VARIANT (1)...(19): Xaa = Any Amino Acid
PGTCGXXEIXCAYAACTGC

SEQ ID NO: 2898 - protein, 20 aa, Artificial Sequence
  Synthetically generated peptide
  VARIANT (1)...(20): Xaa = Any Amino Acid
PGTCGXXEIXXCAYAACTGC

SEQ ID NO: 2899 - protein, 20 aa, Artificial Sequence
  Synthetically generated peptide
  VARIANT (1)...(20): Xaa = Any Amino Acid
PGTCGXXEIXCXAYAACTGC

SEQ ID NO: 2900 - protein, 20 aa, Artificial Sequence
  Synthetically generated peptide
  VARIANT (1)...(20): Xaa = Any Amino Acid
PGTCGXXEIXCAXYAACTGC

SEQ ID NO: 2901 - protein, 20 aa, Artificial Sequence
  Synthetically generated peptide
  VARIANT (1)...(20): Xaa = Any Amino Acid
PGTCGXXEIXCAYXAACTGC

SEQ ID NO: 2902 - protein, 20 aa, Artificial Sequence
  Synthetically generated peptide
  VARIANT (1)...(20): Xaa = Any Amino Acid
PGTCGXXEIXCAYAXACTGC

SEQ ID NO: 2903 - protein, 20 aa, Artificial Sequence
  Synthetically generated peptide
  VARIANT (1)...(20): Xaa = Any Amino Acid
PGTCGXXEIXCAYAAXCTGC

SEQ ID NO: 2904 - protein, 20 aa, Artificial Sequence
  Synthetically generated peptide
  VARIANT (1)...(20): Xaa = Any Amino Acid
PGTCGXXEIXCAYAACXTGC

SEQ ID NO: 2905 - protein, 20 aa, Artificial Sequence
  Synthetically generated peptide
  VARIANT (1)...(20): Xaa = Any Amino Acid
PGTCGXXEIXCAYAACTXGC

SEQ ID NO: 2906 - protein, 20 aa, Artificial Sequence
  Synthetically generated peptide
  VARIANT (1)...(20): Xaa = Any Amino Acid
PGTCGXXEIXCAYAACTGXC

SEQ ID NO: 2907 - protein, 20 aa, Artificial Sequence
  Synthetically generated peptide
  VARIANT (1)...(20): Xaa = Any Amino Acid
PGTCGXXEIXCAYAACTGCX

SEQ ID NO: 2908 - protein, 19 aa, Artificial Sequence
  Synthetically generated peptide
  VARIANT (1)...(19): Xaa = Any Amino Acid
PGTCGXXEICXAYAACTGC

SEQ ID NO: 2909 - protein, 20 aa, Artificial Sequence
  Synthetically generated peptide
  VARIANT (1)...(20): Xaa = Any Amino Acid
PGTCGXXEICXXAYAACTGC

SEQ ID NO: 2910 - protein, 20 aa, Artificial Sequence
  Synthetically generated peptide
  VARIANT (1)...(20): Xaa = Any Amino Acid
PGTCGXXEICXAXYAACTGC

SEQ ID NO: 2911 - protein, 20 aa, Artificial Sequence
  Synthetically generated peptide
  VARIANT (1)...(20): Xaa = Any Amino Acid
PGTCGXXEICXAYXAACTGC

SEQ ID NO: 2912 - protein, 20 aa, Artificial Sequence
  Synthetically generated peptide
  VARIANT (1)...(20): Xaa = Any Amino Acid
PGTCGXXEICXAYAXACTGC

SEQ ID NO: 2913 - protein, 20 aa, Artificial Sequence
  Synthetically generated peptide
  VARIANT (1)...(20): Xaa = Any Amino Acid
PGTCGXXEICXAYAAXCTGC

SEQ ID NO: 2914 - protein, 20 aa, Artificial Sequence
  Synthetically generated peptide
  VARIANT (1)...(20): Xaa = Any Amino Acid
PGTCGXXEICXAYAACXTGC

SEQ ID NO: 2915 - protein, 20 aa, Artificial Sequence
  Synthetically generated peptide
  VARIANT (1)...(20): Xaa = Any Amino Acid
PGTCGXXEICXAYAACTXGC

SEQ ID NO: 2916 - protein, 20 aa, Artificial Sequence
  Synthetically generated peptide
  VARIANT (1)...(20): Xaa = Any Amino Acid
PGTCGXXEICXAYAACTGXC

SEQ ID NO: 2917 - protein, 20 aa, Artificial Sequence
  Synthetically generated peptide
  VARIANT (1)...(20): Xaa = Any Amino Acid
PGTCGXXEICXAYAACTGCX

SEQ ID NO: 2918 - protein, 19 aa, Artificial Sequence
  Synthetically generated peptide
  VARIANT (1)...(19): Xaa = Any Amino Acid
PGTCGXXEICAXYAACTGC

SEQ ID NO: 2919 - protein, 20 aa, Artificial Sequence
  Synthetically generated peptide
  VARIANT (1)...(20): Xaa = Any Amino Acid
PGTCGXXEICAXXYAACTGC

SEQ ID NO: 2920 - protein, 20 aa, Artificial Sequence
  Synthetically generated peptide
  VARIANT (1)...(20): Xaa = Any Amino Acid
PGTCGXXEICAXYXAACTGC

SEQ ID NO: 2921 - protein, 20 aa, Artificial Sequence
  Synthetically generated peptide
  VARIANT (1)...(20): Xaa = Any Amino Acid
PGTCGXXEICAXYAXACTGC

SEQ ID NO: 2922 - protein, 20 aa, Artificial Sequence
  Synthetically generated peptide
  VARIANT (1)...(20): Xaa = Any Amino Acid
PGTCGXXEICAXYAAXCTGC

SEQ ID NO: 2923 - protein, 20 aa, Artificial Sequence
  Synthetically generated peptide
  VARIANT (1)...(20): Xaa = Any Amino Acid
PGTCGXXEICAXYAACXTGC

SEQ ID NO: 2924 - protein, 20 aa, Artificial Sequence
  Synthetically generated peptide
  VARIANT (1)...(20): Xaa = Any Amino Acid
PGTCGXXEICAXYAACTXGC

SEQ ID NO: 2925 - protein, 20 aa, Artificial Sequence
  Synthetically generated peptide
  VARIANT (1)...(20): Xaa = Any Amino Acid
PGTCGXXEICAXYAACTGXC

SEQ ID NO: 2926 - protein, 20 aa, Artificial Sequence
  Synthetically generated peptide
  VARIANT (1)...(20): Xaa = Any Amino Acid
PGTCGXXEICAXYAACTGCX

SEQ ID NO: 2927 - protein, 19 aa, Artificial Sequence
  Synthetically generated peptide
  VARIANT (1)...(19): Xaa = Any Amino Acid
PGTCGXXEICAYXAACTGC

SEQ ID NO: 2928 - protein, 20 aa, Artificial Sequence
  Synthetically generated peptide
  VARIANT (1)...(20): Xaa = Any Amino Acid
PGTCGXXEICAYXXAACTGC

SEQ ID NO: 2929 - protein, 20 aa, Artificial Sequence
  Synthetically generated peptide
  VARIANT (1)...(20): Xaa = Any Amino Acid
PGTCGXXEICAYXAXACTGC

SEQ ID NO: 2930 - protein, 20 aa, Artificial Sequence
  Synthetically generated peptide
  VARIANT (1)...(20): Xaa = Any Amino Acid
PGTCGXXEICAYXAAXCTGC

SEQ ID NO: 2931 - protein, 20 aa, Artificial Sequence
  Synthetically generated peptide
  VARIANT (1)...(20): Xaa = Any Amino Acid
PGTCGXXEICAYXAACXTGC

SEQ ID NO: 2932 - protein, 20 aa, Artificial Sequence
  Synthetically generated peptide
  VARIANT (1)...(20): Xaa = Any Amino Acid
PGTCGXXEICAYXAACTXGC

SEQ ID NO: 2933 - protein, 20 aa, Artificial Sequence
  Synthetically generated peptide
  VARIANT (1)...(20): Xaa = Any Amino Acid
PGTCGXXEICAYXAACTGXC

SEQ ID NO: 2934 - protein, 20 aa, Artificial Sequence
  Synthetically generated peptide
  VARIANT (1)...(20): Xaa = Any Amino Acid
PGTCGXXEICAYXAACTGCX

SEQ ID NO: 2935 - protein, 19 aa, Artificial Sequence
  Synthetically generated peptide
  VARIANT (1)...(19): Xaa = Any Amino Acid
PGTCGXXEICAYAXACTGC

SEQ ID NO: 2936 - protein, 20 aa, Artificial Sequence
  Synthetically generated peptide
  VARIANT (1)...(20): Xaa = Any Amino Acid
PGTCGXXEICAYAXXACTGC

SEQ ID NO: 2937 - protein, 20 aa, Artificial Sequence
  Synthetically generated peptide
  VARIANT (1)...(20): Xaa = Any Amino Acid
PGTCGXXEICAYAXAXCTGC

SEQ ID NO: 2938 - protein, 20 aa, Artificial Sequence
  Synthetically generated peptide
  VARIANT (1)...(20): Xaa = Any Amino Acid
PGTCGXXEICAYAXACXTGC

SEQ ID NO: 2939 - protein, 20 aa, Artificial Sequence
  Synthetically generated peptide
  VARIANT (1)...(20): Xaa = Any Amino Acid
PGTCGXXEICAYAXACTXGC

SEQ ID NO: 2940 - protein, 20 aa, Artificial Sequence
  Synthetically generated peptide
  VARIANT (1)...(20): Xaa = Any Amino Acid
PGTCGXXEICAYAXACTGXC

SEQ ID NO: 2941 - protein, 20 aa, Artificial Sequence
  Synthetically generated peptide
  VARIANT (1)...(20): Xaa = Any Amino Acid
PGTCGXXEICAYAXACTGCX

SEQ ID NO: 2942 - protein, 19 aa, Artificial Sequence
  Synthetically generated peptide
  VARIANT (1)...(19): Xaa = Any Amino Acid
PGTCGXXEICAYAAXCTGC

SEQ ID NO: 2943 - protein, 20 aa, Artificial Sequence
  Synthetically generated peptide
  VARIANT (1)...(20): Xaa = Any Amino Acid
PGTCGXXEICAYAAXXCTGC

SEQ ID NO: 2944 - protein, 20 aa, Artificial Sequence
  Synthetically generated peptide
  VARIANT (1)...(20): Xaa = Any Amino Acid
PGTCGXXEICAYAAXCXTGC

SEQ ID NO: 2945 - protein, 20 aa, Artificial Sequence
  Synthetically generated peptide
  VARIANT (1)...(20): Xaa = Any Amino Acid
PGTCGXXEICAYAAXCTXGC

SEQ ID NO: 2946 - protein, 20 aa, Artificial Sequence
  Synthetically generated peptide
  VARIANT (1)...(20): Xaa = Any Amino Acid
PGTCGXXEICAYAAXCTGXC

SEQ ID NO: 2947 - protein, 20 aa, Artificial Sequence
  Synthetically generated peptide
  VARIANT (1)...(20): Xaa = Any Amino Acid
PGTCGXXEICAYAAXCTGCX

SEQ ID NO: 2948 - protein, 19 aa, Artificial Sequence
  Synthetically generated peptide
  VARIANT (1)...(19): Xaa = Any Amino Acid
PGTCGXXEICAYAACXTGC

SEQ ID NO: 2949 - protein, 20 aa, Artificial Sequence
  Synthetically generated peptide
  VARIANT (1)...(20): Xaa = Any Amino Acid
PGTCGXXEICAYAACXXTGC

SEQ ID NO: 2950 - protein, 20 aa, Artificial Sequence
  Synthetically generated peptide
  VARIANT (1)...(20): Xaa = Any Amino Acid
PGTCGXXEICAYAACXTXGC

SEQ ID NO: 2951 - protein, 20 aa, Artificial Sequence
  Synthetically generated peptide
  VARIANT (1)...(20): Xaa = Any Amino Acid
PGTCGXXEICAYAACXTGXC

SEQ ID NO: 2952 - protein, 20 aa, Artificial Sequence
  Synthetically generated peptide
  VARIANT (1)...(20): Xaa = Any Amino Acid
PGTCGXXEICAYAACXTGCX

SEQ ID NO: 2953 - protein, 19 aa, Artificial Sequence
  Synthetically generated peptide
  VARIANT (1)...(19): Xaa = Any Amino Acid
PGTCGXXEICAYAACTXGC

SEQ ID NO: 2954 - protein, 20 aa, Artificial Sequence
  Synthetically generated peptide
  VARIANT (1)...(20): Xaa = Any Amino Acid
PGTCGXXEICAYAACTXXGC

SEQ ID NO: 2955 - protein, 20 aa, Artificial Sequence
  Synthetically generated peptide
  VARIANT (1)...(20): Xaa = Any Amino Acid
PGTCGXXEICAYAACTXGXC

SEQ ID NO: 2956 - protein, 20 aa, Artificial Sequence
  Synthetically generated peptide
  VARIANT (1)...(20): Xaa = Any Amino Acid
PGTCGXXEICAYAACTXGCX

SEQ ID NO: 2957 - protein, 19 aa, Artificial Sequence
  Synthetically generated peptide
  VARIANT (1)...(19): Xaa = Any Amino Acid
PGTCGXXEICAYAACTGXC

SEQ ID NO: 2958 - protein, 20 aa, Artificial Sequence
  Synthetically generated peptide
  VARIANT (1)...(20): Xaa = Any Amino Acid
PGTCGXXEICAYAACTGXXC

SEQ ID NO: 2959 - protein, 20 aa, Artificial Sequence
  Synthetically generated peptide
  VARIANT (1)...(20): Xaa = Any Amino Acid
PGTCGXXEICAYAACTGXCX

SEQ ID NO: 2960 - protein, 19 aa, Artificial Sequence
  Synthetically generated peptide
  VARIANT (1)...(19): Xaa = Any Amino Acid
PGTCGXXEICAYAACTGCX

SEQ ID NO: 2961 - protein, 20 aa, Artificial Sequence
  Synthetically generated peptide
  VARIANT (1)...(20): Xaa = Any Amino Acid
PGTCGXXEICAYAACTGCXX

SEQ ID NO: 2962 - protein, 18 aa, Artificial Sequence
  Synthetically generated peptide
  VARIANT (1)...(18): Xaa = Any Amino Acid
PGTCGXEXICAYAACTGC

SEQ ID NO: 2963 - protein, 19 aa, Artificial Sequence
  Synthetically generated peptide
  VARIANT (1)...(19): Xaa = Any Amino Acid
PGTCGXEXXICAYAACTGC

SEQ ID NO: 2964 - protein, 20 aa, Artificial Sequence
  Synthetically generated peptide
  VARIANT (1)...(20): Xaa = Any Amino Acid
PGTCGXEXXXICAYAACTGC

SEQ ID NO: 2965 - protein, 20 aa, Artificial Sequence
  Synthetically generated peptide
  VARIANT (1)...(20): Xaa = Any Amino Acid
PGTCGXEXXIXCAYAACTGC

SEQ ID NO: 2966 - protein, 20 aa, Artificial Sequence
  Synthetically generated peptide
  VARIANT (1)...(20): Xaa = Any Amino Acid
PGTCGXEXXICXAYAACTGC

SEQ ID NO: 2967 - protein, 20 aa, Artificial Sequence
  Synthetically generated peptide
  VARIANT (1)...(20): Xaa = Any Amino Acid
PGTCGXEXXICAXYAACTGC

SEQ ID NO: 2968 - protein, 20 aa, Artificial Sequence
  Synthetically generated peptide
  VARIANT (1)...(20): Xaa = Any Amino Acid
PGTCGXEXXICAYXAACTGC

SEQ ID NO: 2969 - protein, 20 aa, Artificial Sequence
  Synthetically generated peptide
  VARIANT (1)...(20): Xaa = Any Amino Acid
PGTCGXEXXICAYAXACTGC

SEQ ID NO: 2970 - protein, 20 aa, Artificial Sequence
  Synthetically generated peptide
  VARIANT (1)...(20): Xaa = Any Amino Acid
PGTCGXEXXICAYAAXCTGC

SEQ ID NO: 2971 - protein, 20 aa, Artificial Sequence
  Synthetically generated peptide
  VARIANT (1)...(20): Xaa = Any Amino Acid
PGTCGXEXXICAYAACXTGC

SEQ ID NO: 2972 - protein, 20 aa, Artificial Sequence
  Synthetically generated peptide
  VARIANT (1)...(20): Xaa = Any Amino Acid
PGTCGXEXXICAYAACTXGC

SEQ ID NO: 2973 - protein, 20 aa, Artificial Sequence
  Synthetically generated peptide
  VARIANT (1)...(20): Xaa = Any Amino Acid
PGTCGXEXXICAYAACTGXC

SEQ ID NO: 2974 - protein, 20 aa, Artificial Sequence
  Synthetically generated peptide
  VARIANT (1)...(20): Xaa = Any Amino Acid
PGTCGXEXXICAYAACTGCX

SEQ ID NO: 2975 - protein, 19 aa, Artificial Sequence
  Synthetically generated peptide
  VARIANT (1)...(19): Xaa = Any Amino Acid
PGTCGXEXIXCAYAACTGC

SEQ ID NO: 2976 - protein, 20 aa, Artificial Sequence
  Synthetically generated peptide
  VARIANT (1)...(20): Xaa = Any Amino Acid
PGTCGXEXIXXCAYAACTGC

SEQ ID NO: 2977 - protein, 20 aa, Artificial Sequence
  Synthetically generated peptide
  VARIANT (1)...(20): Xaa = Any Amino Acid
PGTCGXEXIXCXAYAACTGC

SEQ ID NO: 2978 - protein, 20 aa, Artificial Sequence
  Synthetically generated peptide
  VARIANT (1)...(20): Xaa = Any Amino Acid
PGTCGXEXIXCAXYAACTGC

SEQ ID NO: 2979 - protein, 20 aa, Artificial Sequence
  Synthetically generated peptide
  VARIANT (1)...(20): Xaa = Any Amino Acid
PGTCGXEXIXCAYXAACTGC

SEQ ID NO: 2980 - protein, 20 aa, Artificial Sequence
  Synthetically generated peptide
  VARIANT (1)...(20): Xaa = Any Amino Acid
PGTCGXEXIXCAYAXACTGC

SEQ ID NO: 2981 - protein, 20 aa, Artificial Sequence
  Synthetically generated peptide
  VARIANT (1)...(20): Xaa = Any Amino Acid
PGTCGXEXIXCAYAAXCTGC

SEQ ID NO: 2982 - protein, 20 aa, Artificial Sequence
  Synthetically generated peptide
  VARIANT (1)...(20): Xaa = Any Amino Acid
PGTCGXEXIXCAYAACXTGC

SEQ ID NO: 2983 - protein, 20 aa, Artificial Sequence
  Synthetically generated peptide
  VARIANT (1)...(20): Xaa = Any Amino Acid
PGTCGXEXIXCAYAACTXGC

SEQ ID NO: 2984 - protein, 20 aa, Artificial Sequence
  Synthetically generated peptide
  VARIANT (1)...(20): Xaa = Any Amino Acid
PGTCGXEXIXCAYAACTGXC

SEQ ID NO: 2985 - protein, 20 aa, Artificial Sequence
  Synthetically generated peptide
  VARIANT (1)...(20): Xaa = Any Amino Acid
PGTCGXEXIXCAYAACTGCX

SEQ ID NO: 2986 - protein, 19 aa, Artificial Sequence
  Synthetically generated peptide
  VARIANT (1)...(19): Xaa = Any Amino Acid
PGTCGXEXICXAYAACTGC

SEQ ID NO: 2987 - protein, 20 aa, Artificial Sequence
  Synthetically generated peptide
  VARIANT (1)...(20): Xaa = Any Amino Acid
PGTCGXEXICXXAYAACTGC

SEQ ID NO: 2988 - protein, 20 aa, Artificial Sequence
  Synthetically generated peptide
  VARIANT (1)...(20): Xaa = Any Amino Acid
PGTCGXEXICXAXYAACTGC

SEQ ID NO: 2989 - protein, 20 aa, Artificial Sequence
  Synthetically generated peptide
  VARIANT (1)...(20): Xaa = Any Amino Acid
PGTCGXEXICXAYXAACTGC

SEQ ID NO: 2990 - protein, 20 aa, Artificial Sequence
  Synthetically generated peptide
  VARIANT (1)...(20): Xaa = Any Amino Acid
PGTCGXEXICXAYAXACTGC

SEQ ID NO: 2991 - protein, 20 aa, Artificial Sequence
  Synthetically generated peptide
  VARIANT (1)...(20): Xaa = Any Amino Acid
PGTCGXEXICXAYAAXCTGC

SEQ ID NO: 2992 - protein, 20 aa, Artificial Sequence
  Synthetically generated peptide
  VARIANT (1)...(20): Xaa = Any Amino Acid
PGTCGXEXICXAYAACXTGC

SEQ ID NO: 2993 - protein, 20 aa, Artificial Sequence
  Synthetically generated peptide
  VARIANT (1)...(20): Xaa = Any Amino Acid
PGTCGXEXICXAYAACTXGC

SEQ ID NO: 2994 - protein, 20 aa, Artificial Sequence
  Synthetically generated peptide
  VARIANT (1)...(20): Xaa = Any Amino Acid
PGTCGXEXICXAYAACTGXC

SEQ ID NO: 2995 - protein, 20 aa, Artificial Sequence
  Synthetically generated peptide
  VARIANT (1)...(20): Xaa = Any Amino Acid
PGTCGXEXICXAYAACTGCX

SEQ ID NO: 2996 - protein, 19 aa, Artificial Sequence
  Synthetically generated peptide
  VARIANT (1)...(19): Xaa = Any Amino Acid
PGTCGXEXICAXYAACTGC

SEQ ID NO: 2997 - protein, 20 aa, Artificial Sequence
  Synthetically generated peptide
  VARIANT (1)...(20): Xaa = Any Amino Acid
PGTCGXEXICAXXYAACTGC

SEQ ID NO: 2998 - protein, 20 aa, Artificial Sequence
  Synthetically generated peptide
  VARIANT (1)...(20): Xaa = Any Amino Acid
PGTCGXEXICAXYXAACTGC

SEQ ID NO: 2999 - protein, 20 aa, Artificial Sequence
  Synthetically generated peptide
  VARIANT (1)...(20): Xaa = Any Amino Acid
PGTCGXEXICAXYAXACTGC

SEQ ID NO: 3000 - protein, 20 aa, Artificial Sequence
  Synthetically generated peptide
  VARIANT (1)...(20): Xaa = Any Amino Acid
PGTCGXEXICAXYAAXCTGC

SEQ ID NO: 3001 - protein, 20 aa, Artificial Sequence
  Synthetically generated peptide
  VARIANT (1)...(20): Xaa = Any Amino Acid
PGTCGXEXICAXYAACXTGC

SEQ ID NO: 3002 - protein, 20 aa, Artificial Sequence
  Synthetically generated peptide
  VARIANT (1)...(20): Xaa = Any Amino Acid
PGTCGXEXICAXYAACTXGC

SEQ ID NO: 3003 - protein, 20 aa, Artificial Sequence
  Synthetically generated peptide
  VARIANT (1)...(20): Xaa = Any Amino Acid
PGTCGXEXICAXYAACTGXC

SEQ ID NO: 3004 - protein, 20 aa, Artificial Sequence
  Synthetically generated peptide
  VARIANT (1)...(20): Xaa = Any Amino Acid
PGTCGXEXICAXYAACTGCX

SEQ ID NO: 3005 - protein, 19 aa, Artificial Sequence
  Synthetically generated peptide
  VARIANT (1)...(19): Xaa = Any Amino Acid
PGTCGXEXICAYXAACTGC

SEQ ID NO: 3006 - protein, 20 aa, Artificial Sequence
  Synthetically generated peptide
  VARIANT (1)...(20): Xaa = Any Amino Acid
PGTCGXEXICAYXXAACTGC

SEQ ID NO: 3007 - protein, 20 aa, Artificial Sequence
  Synthetically generated peptide
  VARIANT (1)...(20): Xaa = Any Amino Acid
PGTCGXEXICAYXAXACTGC

SEQ ID NO: 3008 - protein, 20 aa, Artificial Sequence
  Synthetically generated peptide
  VARIANT (1)...(20): Xaa = Any Amino Acid
PGTCGXEXICAYXAAXCTGC

SEQ ID NO: 3009 - protein, 20 aa, Artificial Sequence
  Synthetically generated peptide
  VARIANT (1)...(20): Xaa = Any Amino Acid
PGTCGXEXICAYXAACXTGC

SEQ ID NO: 3010 - protein, 20 aa, Artificial Sequence
  Synthetically generated peptide
  VARIANT (1)...(20): Xaa = Any Amino Acid
PGTCGXEXICAYXAACTXGC

SEQ ID NO: 3011 - protein, 20 aa, Artificial Sequence
  Synthetically generated peptide
  VARIANT (1)...(20): Xaa = Any Amino Acid
PGTCGXEXICAYXAACTGXC

SEQ ID NO: 3012 - protein, 20 aa, Artificial Sequence
  Synthetically generated peptide
  VARIANT (1)...(20): Xaa = Any Amino Acid
PGTCGXEXICAYXAACTGCX

SEQ ID NO: 3013 - protein, 19 aa, Artificial Sequence
  Synthetically generated peptide
  VARIANT (1)...(19): Xaa = Any Amino Acid
PGTCGXEXICAYAXACTGC

SEQ ID NO: 3014 - protein, 20 aa, Artificial Sequence
  Synthetically generated peptide
  VARIANT (1)...(20): Xaa = Any Amino Acid
PGTCGXEXICAYAXXACTGC

SEQ ID NO: 3015 - protein, 20 aa, Artificial Sequence
  Synthetically generated peptide
  VARIANT (1)...(20): Xaa = Any Amino Acid
PGTCGXEXICAYAXAXCTGC

SEQ ID NO: 3016 - protein, 20 aa, Artificial Sequence
  Synthetically generated peptide
  VARIANT (1)...(20): Xaa = Any Amino Acid
PGTCGXEXICAYAXACXTGC

SEQ ID NO: 3017 - protein, 20 aa, Artificial Sequence
  Synthetically generated peptide
  VARIANT (1)...(20): Xaa = Any Amino Acid
PGTCGXEXICAYAXACTXGC

SEQ ID NO: 3018 - protein, 20 aa, Artificial Sequence
  Synthetically generated peptide
  VARIANT (1)...(20): Xaa = Any Amino Acid
PGTCGXEXICAYAXACTGXC

SEQ ID NO: 3019 - protein, 20 aa, Artificial Sequence
  Synthetically generated peptide
  VARIANT (1)...(20): Xaa = Any Amino Acid
PGTCGXEXICAYAXACTGCX

SEQ ID NO: 3020 - protein, 19 aa, Artificial Sequence
  Synthetically generated peptide
  VARIANT (1)...(19): Xaa = Any Amino Acid
PGTCGXEXICAYAAXCTGC

SEQ ID NO: 3021 - protein, 20 aa, Artificial Sequence
  Synthetically generated peptide
  VARIANT (1)...(20): Xaa = Any Amino Acid
PGTCGXEXICAYAAXXCTGC

SEQ ID NO: 3022 - protein, 20 aa, Artificial Sequence
  Synthetically generated peptide
  VARIANT (1)...(20): Xaa = Any Amino Acid
PGTCGXEXICAYAAXCXTGC

SEQ ID NO: 3023 - protein, 20 aa, Artificial Sequence
  Synthetically generated peptide
  VARIANT (1)...(20): Xaa = Any Amino Acid
PGTCGXEXICAYAAXCTXGC

SEQ ID NO: 3024 - protein, 20 aa, Artificial Sequence
  Synthetically generated peptide
  VARIANT (1)...(20): Xaa = Any Amino Acid
PGTCGXEXICAYAAXCTGXC

SEQ ID NO: 3025 - protein, 20 aa, Artificial Sequence
  Synthetically generated peptide
  VARIANT (1)...(20): Xaa = Any Amino Acid
PGTCGXEXICAYAAXCTGCX

SEQ ID NO: 3026 - protein, 19 aa, Artificial Sequence
  Synthetically generated peptide
  VARIANT (1)...(19): Xaa = Any Amino Acid
PGTCGXEXICAYAACXTGC

SEQ ID NO: 3027 - protein, 20 aa, Artificial Sequence
  Synthetically generated peptide
  VARIANT (1)...(20): Xaa = Any Amino Acid
PGTCGXEXICAYAACXXTGC

SEQ ID NO: 3028 - protein, 20 aa, Artificial Sequence
  Synthetically generated peptide
  VARIANT (1)...(20): Xaa = Any Amino Acid
PGTCGXEXICAYAACXTXGC

SEQ ID NO: 3029 - protein, 20 aa, Artificial Sequence
  Synthetically generated peptide
  VARIANT (1)...(20): Xaa = Any Amino Acid
PGTCGXEXICAYAACXTGXC

SEQ ID NO: 3030 - protein, 20 aa, Artificial Sequence
  Synthetically generated peptide
  VARIANT (1)...(20): Xaa = Any Amino Acid
PGTCGXEXICAYAACXTGCX

SEQ ID NO: 3031 - protein, 19 aa, Artificial Sequence
  Synthetically generated peptide
  VARIANT (1)...(19): Xaa = Any Amino Acid
PGTCGXEXICAYAACTXGC

SEQ ID NO: 3032 - protein, 20 aa, Artificial Sequence
  Synthetically generated peptide
  VARIANT (1)...(20): Xaa = Any Amino Acid
PGTCGXEXICAYAACTXXGC

SEQ ID NO: 3033 - protein, 20 aa, Artificial Sequence
  Synthetically generated peptide
  VARIANT (1)...(20): Xaa = Any Amino Acid
PGTCGXEXICAYAACTXGXC

SEQ ID NO: 3034 - protein, 20 aa, Artificial Sequence
  Synthetically generated peptide
  VARIANT (1)...(20): Xaa = Any Amino Acid
PGTCGXEXICAYAACTXGCX

SEQ ID NO: 3035 - protein, 19 aa, Artificial Sequence
  Synthetically generated peptide
  VARIANT (1)...(19): Xaa = Any Amino Acid
PGTCGXEXICAYAACTGXC

SEQ ID NO: 3036 - protein, 20 aa, Artificial Sequence
  Synthetically generated peptide
  VARIANT (1)...(20): Xaa = Any Amino Acid
PGTCGXEXICAYAACTGXXC

SEQ ID NO: 3037 - protein, 20 aa, Artificial Sequence
  Synthetically generated peptide
  VARIANT (1)...(20): Xaa = Any Amino Acid
PGTCGXEXICAYAACTGXCX

SEQ ID NO: 3038 - protein, 19 aa, Artificial Sequence
  Synthetically generated peptide
  VARIANT (1)...(19): Xaa = Any Amino Acid
PGTCGXEXICAYAACTGCX

SEQ ID NO: 3039 - protein, 20 aa, Artificial Sequence
  Synthetically generated peptide
  VARIANT (1)...(20): Xaa = Any Amino Acid
PGTCGXEXICAYAACTGCXX

SEQ ID NO: 3040 - protein, 18 aa, Artificial Sequence
  Synthetically generated peptide
  VARIANT (1)...(18): Xaa = Any Amino Acid
PGTCGXEIXCAYAACTGC

SEQ ID NO: 3041 - protein, 19 aa, Artificial Sequence
  Synthetically generated peptide
  VARIANT (1)...(19): Xaa = Any Amino Acid
PGTCGXEIXXCAYAACTGC

SEQ ID NO: 3042 - protein, 20 aa, Artificial Sequence
  Synthetically generated peptide
  VARIANT (1)...(20): Xaa = Any Amino Acid
PGTCGXEIXXXCAYAACTGC

SEQ ID NO: 3043 - protein, 20 aa, Artificial Sequence
  Synthetically generated peptide
  VARIANT (1)...(20): Xaa = Any Amino Acid
PGTCGXEIXXCXAYAACTGC

SEQ ID NO: 3044 - protein, 20 aa, Artificial Sequence
  Synthetically generated peptide
  VARIANT (1)...(20): Xaa = Any Amino Acid
PGTCGXEIXXCAXYAACTGC

SEQ ID NO: 3045 - protein, 20 aa, Artificial Sequence
  Synthetically generated peptide
  VARIANT (1)...(20): Xaa = Any Amino Acid
PGTCGXEIXXCAYXAACTGC

SEQ ID NO: 3046 - protein, 20 aa, Artificial Sequence
  Synthetically generated peptide
  VARIANT (1)...(20): Xaa = Any Amino Acid
PGTCGXEIXXCAYAXACTGC

SEQ ID NO: 3047 - protein, 20 aa, Artificial Sequence
  Synthetically generated peptide
  VARIANT (1)...(20): Xaa = Any Amino Acid
PGTCGXEIXXCAYAAXCTGC

SEQ ID NO: 3048 - protein, 20 aa, Artificial Sequence
  Synthetically generated peptide
  VARIANT (1)...(20): Xaa = Any Amino Acid
PGTCGXEIXXCAYAACXTGC

SEQ ID NO: 3049 - protein, 20 aa, Artificial Sequence
  Synthetically generated peptide
  VARIANT (1)...(20): Xaa = Any Amino Acid
PGTCGXEIXXCAYAACTXGC

SEQ ID NO: 3050 - protein, 20 aa, Artificial Sequence
  Synthetically generated peptide
  VARIANT (1)...(20): Xaa = Any Amino Acid
PGTCGXEIXXCAYAACTGXC

SEQ ID NO: 3051 - protein, 20 aa, Artificial Sequence
  Synthetically generated peptide
  VARIANT (1)...(20): Xaa = Any Amino Acid
PGTCGXEIXXCAYAACTGCX

SEQ ID NO: 3052 - protein, 19 aa, Artificial Sequence
  Synthetically generated peptide
  VARIANT (1)...(19): Xaa = Any Amino Acid
PGTCGXEIXCXAYAACTGC

SEQ ID NO: 3053 - protein, 20 aa, Artificial Sequence
  Synthetically generated peptide
  VARIANT (1)...(20): Xaa = Any Amino Acid
PGTCGXEIXCXXAYAACTGC

SEQ ID NO: 3054 - protein, 20 aa, Artificial Sequence
  Synthetically generated peptide
  VARIANT (1)...(20): Xaa = Any Amino Acid
PGTCGXEIXCXAXYAACTGC

SEQ ID NO: 3055 - protein, 20 aa, Artificial Sequence
  Synthetically generated peptide
  VARIANT (1)...(20): Xaa = Any Amino Acid
PGTCGXEIXCXAYXAACTGC

SEQ ID NO: 3056 - protein, 20 aa, Artificial Sequence
  Synthetically generated peptide
  VARIANT (1)...(20): Xaa = Any Amino Acid
PGTCGXEIXCXAYAXACTGC

SEQ ID NO: 3057 - protein, 20 aa, Artificial Sequence
  Synthetically generated peptide
  VARIANT (1)...(20): Xaa = Any Amino Acid
PGTCGXEIXCXAYAAXCTGC

SEQ ID NO: 3058 - protein, 20 aa, Artificial Sequence
  Synthetically generated peptide
  VARIANT (1)...(20): Xaa = Any Amino Acid
PGTCGXEIXCXAYAACXTGC

SEQ ID NO: 3059 - protein, 20 aa, Artificial Sequence
  Synthetically generated peptide
  VARIANT (1)...(20): Xaa = Any Amino Acid
PGTCGXEIXCXAYAACTXGC

SEQ ID NO: 3060 - protein, 20 aa, Artificial Sequence
  Synthetically generated peptide
  VARIANT (1)...(20): Xaa = Any Amino Acid
PGTCGXEIXCXAYAACTGXC

SEQ ID NO: 3061 - protein, 20 aa, Artificial Sequence
  Synthetically generated peptide
  VARIANT (1)...(20): Xaa = Any Amino Acid
PGTCGXEIXCXAYAACTGCX

SEQ ID NO: 3062 - protein, 19 aa, Artificial Sequence
  Synthetically generated peptide
  VARIANT (1)...(19): Xaa = Any Amino Acid
PGTCGXEIXCAXYAACTGC

SEQ ID NO: 3063 - protein, 20 aa, Artificial Sequence
  Synthetically generated peptide
  VARIANT (1)...(20): Xaa = Any Amino Acid
PGTCGXEIXCAXXYAACTGC

SEQ ID NO: 3064 - protein, 20 aa, Artificial Sequence
  Synthetically generated peptide
  VARIANT (1)...(20): Xaa = Any Amino Acid
PGTCGXEIXCAXYXAACTGC

SEQ ID NO: 3065 - protein, 20 aa, Artificial Sequence
  Synthetically generated peptide
  VARIANT (1)...(20): Xaa = Any Amino Acid
PGTCGXEIXCAXYAXACTGC

SEQ ID NO: 3066 - protein, 20 aa, Artificial Sequence
  Synthetically generated peptide
  VARIANT (1)...(20): Xaa = Any Amino Acid
PGTCGXEIXCAXYAAXCTGC

SEQ ID NO: 3067 - protein, 20 aa, Artificial Sequence
  Synthetically generated peptide
  VARIANT (1)...(20): Xaa = Any Amino Acid
PGTCGXEIXCAXYAACXTGC

SEQ ID NO: 3068 - protein, 20 aa, Artificial Sequence
  Synthetically generated peptide
  VARIANT (1)...(20): Xaa = Any Amino Acid
PGTCGXEIXCAXYAACTXGC

SEQ ID NO: 3069 - protein, 20 aa, Artificial Sequence
  Synthetically generated peptide
  VARIANT (1)...(20): Xaa = Any Amino Acid
PGTCGXEIXCAXYAACTGXC

SEQ ID NO: 3070 - protein, 20 aa, Artificial Sequence
  Synthetically generated peptide
  VARIANT (1)...(20): Xaa = Any Amino Acid
PGTCGXEIXCAXYAACTGCX

SEQ ID NO: 3071 - protein, 19 aa, Artificial Sequence
  Synthetically generated peptide
  VARIANT (1)...(19): Xaa = Any Amino Acid
PGTCGXEIXCAYXAACTGC

SEQ ID NO: 3072 - protein, 20 aa, Artificial Sequence
  Synthetically generated peptide
  VARIANT (1)...(20): Xaa = Any Amino Acid
PGTCGXEIXCAYXXAACTGC

SEQ ID NO: 3073 - protein, 20 aa, Artificial Sequence
  Synthetically generated peptide
  VARIANT (1)...(20): Xaa = Any Amino Acid
PGTCGXEIXCAYXAXACTGC

SEQ ID NO: 3074 - protein, 20 aa, Artificial Sequence
  Synthetically generated peptide
  VARIANT (1)...(20): Xaa = Any Amino Acid
PGTCGXEIXCAYXAAXCTGC

SEQ ID NO: 3075 - protein, 20 aa, Artificial Sequence
  Synthetically generated peptide
  VARIANT (1)...(20): Xaa = Any Amino Acid
PGTCGXEIXCAYXAACXTGC

SEQ ID NO: 3076 - protein, 20 aa, Artificial Sequence
  Synthetically generated peptide
  VARIANT (1)...(20): Xaa = Any Amino Acid
PGTCGXEIXCAYXAACTXGC

SEQ ID NO: 3077 - protein, 20 aa, Artificial Sequence
  Synthetically generated peptide
  VARIANT (1)...(20): Xaa = Any Amino Acid
PGTCGXEIXCAYXAACTGXC

SEQ ID NO: 3078 - protein, 20 aa, Artificial Sequence
  Synthetically generated peptide
  VARIANT (1)...(20): Xaa = Any Amino Acid
PGTCGXEIXCAYXAACTGCX

SEQ ID NO: 3079 - protein, 19 aa, Artificial Sequence
  Synthetically generated peptide
  VARIANT (1)...(19): Xaa = Any Amino Acid
PGTCGXEIXCAYAXACTGC

SEQ ID NO: 3080 - protein, 20 aa, Artificial Sequence
  Synthetically generated peptide
  VARIANT (1)...(20): Xaa = Any Amino Acid
PGTCGXEIXCAYAXXACTGC

SEQ ID NO: 3081 - protein, 20 aa, Artificial Sequence
  Synthetically generated peptide
  VARIANT (1)...(20): Xaa = Any Amino Acid
PGTCGXEIXCAYAXAXCTGC

SEQ ID NO: 3082 - protein, 20 aa, Artificial Sequence
  Synthetically generated peptide
  VARIANT (1)...(20): Xaa = Any Amino Acid
PGTCGXEIXCAYAXACXTGC

SEQ ID NO: 3083 - protein, 20 aa, Artificial Sequence
  Synthetically generated peptide
  VARIANT (1)...(20): Xaa = Any Amino Acid
PGTCGXEIXCAYAXACTXGC

SEQ ID NO: 3084 - protein, 20 aa, Artificial Sequence
  Synthetically generated peptide
  VARIANT (1)...(20): Xaa = Any Amino Acid
PGTCGXEIXCAYAXACTGXC

SEQ ID NO: 3085 - protein, 20 aa, Artificial Sequence
  Synthetically generated peptide
  VARIANT (1)...(20): Xaa = Any Amino Acid
PGTCGXEIXCAYAXACTGCX

SEQ ID NO: 3086 - protein, 19 aa, Artificial Sequence
  Synthetically generated peptide
  VARIANT (1)...(19): Xaa = Any Amino Acid
PGTCGXEIXCAYAAXCTGC

SEQ ID NO: 3087 - protein, 20 aa, Artificial Sequence
  Synthetically generated peptide
  VARIANT (1)...(20): Xaa = Any Amino Acid
PGTCGXEIXCAYAAXXCTGC

SEQ ID NO: 3088 - protein, 20 aa, Artificial Sequence
  Synthetically generated peptide
  VARIANT (1)...(20): Xaa = Any Amino Acid
PGTCGXEIXCAYAAXCXTGC

SEQ ID NO: 3089 - protein, 20 aa, Artificial Sequence
  Synthetically generated peptide
  VARIANT (1)...(20): Xaa = Any Amino Acid
PGTCGXEIXCAYAAXCTXGC

SEQ ID NO: 3090 - protein, 20 aa, Artificial Sequence
  Synthetically generated peptide
  VARIANT (1)...(20): Xaa = Any Amino Acid
PGTCGXEIXCAYAAXCTGXC

SEQ ID NO: 3091 - protein, 20 aa, Artificial Sequence
  Synthetically generated peptide
  VARIANT (1)...(20): Xaa = Any Amino Acid
PGTCGXEIXCAYAAXCTGCX

SEQ ID NO: 3092 - protein, 19 aa, Artificial Sequence
  Synthetically generated peptide
  VARIANT (1)...(19): Xaa = Any Amino Acid
PGTCGXEIXCAYAACXTGC

SEQ ID NO: 3093 - protein, 20 aa, Artificial Sequence
  Synthetically generated peptide
  VARIANT (1)...(20): Xaa = Any Amino Acid
PGTCGXEIXCAYAACXXTGC

SEQ ID NO: 3094 - protein, 20 aa, Artificial Sequence
  Synthetically generated peptide
  VARIANT (1)...(20): Xaa = Any Amino Acid
PGTCGXEIXCAYAACXTXGC

SEQ ID NO: 3095 - protein, 20 aa, Artificial Sequence
  Synthetically generated peptide
  VARIANT (1)...(20): Xaa = Any Amino Acid
PGTCGXEIXCAYAACXTGXC

SEQ ID NO: 3096 - protein, 20 aa, Artificial Sequence
  Synthetically generated peptide
  VARIANT (1)...(20): Xaa = Any Amino Acid
PGTCGXEIXCAYAACXTGCX

SEQ ID NO: 3097 - protein, 19 aa, Artificial Sequence
  Synthetically generated peptide
  VARIANT (1)...(19): Xaa = Any Amino Acid
PGTCGXEIXCAYAACTXGC

SEQ ID NO: 3098 - protein, 20 aa, Artificial Sequence
  Synthetically generated peptide
  VARIANT (1)...(20): Xaa = Any Amino Acid
PGTCGXEIXCAYAACTXXGC

SEQ ID NO: 3099 - protein, 20 aa, Artificial Sequence
  Synthetically generated peptide
  VARIANT (1)...(20): Xaa = Any Amino Acid
PGTCGXEIXCAYAACTXGXC

SEQ ID NO: 3100 - protein, 20 aa, Artificial Sequence
  Synthetically generated peptide
  VARIANT (1)...(20): Xaa = Any Amino Acid
PGTCGXEIXCAYAACTXGCX

SEQ ID NO: 3101 - protein, 19 aa, Artificial Sequence
  Synthetically generated peptide
  VARIANT (1)...(19): Xaa = Any Amino Acid
PGTCGXEIXCAYAACTGXC

SEQ ID NO: 3102 - protein, 20 aa, Artificial Sequence
  Synthetically generated peptide
  VARIANT (1)...(20): Xaa = Any Amino Acid
PGTCGXEIXCAYAACTGXXC

SEQ ID NO: 3103 - protein, 20 aa, Artificial Sequence
  Synthetically generated peptide
  VARIANT (1)...(20): Xaa = Any Amino Acid
PGTCGXEIXCAYAACTGXCX

SEQ ID NO: 3104 - protein, 19 aa, Artificial Sequence
  Synthetically generated peptide
  VARIANT (1)...(19): Xaa = Any Amino Acid
PGTCGXEIXCAYAACTGCX

SEQ ID NO: 3105 - protein, 20 aa, Artificial Sequence
  Synthetically generated peptide
  VARIANT (1)...(20): Xaa = Any Amino Acid
PGTCGXEIXCAYAACTGCXX

SEQ ID NO: 3106 - protein, 18 aa, Artificial Sequence
  Synthetically generated peptide
  VARIANT (1)...(18): Xaa = Any Amino Acid
PGTCGXEICXAYAACTGC

SEQ ID NO: 3107 - protein, 19 aa, Artificial Sequence
  Synthetically generated peptide
  VARIANT (1)...(19): Xaa = Any Amino Acid
PGTCGXEICXXAYAACTGC

SEQ ID NO: 3108 - protein, 20 aa, Artificial Sequence
  Synthetically generated peptide
  VARIANT (1)...(20): Xaa = Any Amino Acid
PGTCGXEICXXXAYAACTGC

SEQ ID NO: 3109 - protein, 20 aa, Artificial Sequence
  Synthetically generated peptide
  VARIANT (1)...(20): Xaa = Any Amino Acid
PGTCGXEICXXAXYAACTGC

SEQ ID NO: 3110 - protein, 20 aa, Artificial Sequence
  Synthetically generated peptide
  VARIANT (1)...(20): Xaa = Any Amino Acid
PGTCGXEICXXAYXAACTGC

SEQ ID NO: 3111 - protein, 20 aa, Artificial Sequence
  Synthetically generated peptide
  VARIANT (1)...(20): Xaa = Any Amino Acid
PGTCGXEICXXAYAXACTGC

SEQ ID NO: 3112 - protein, 20 aa, Artificial Sequence
  Synthetically generated peptide
  VARIANT (1)...(20): Xaa = Any Amino Acid
PGTCGXEICXXAYAAXCTGC

SEQ ID NO: 3113 - protein, 20 aa, Artificial Sequence
  Synthetically generated peptide
  VARIANT (1)...(20): Xaa = Any Amino Acid
PGTCGXEICXXAYAACXTGC

SEQ ID NO: 3114 - protein, 20 aa, Artificial Sequence
  Synthetically generated peptide
  VARIANT (1)...(20): Xaa = Any Amino Acid
PGTCGXEICXXAYAACTXGC

SEQ ID NO: 3115 - protein, 20 aa, Artificial Sequence
  Synthetically generated peptide
  VARIANT (1)...(20): Xaa = Any Amino Acid
PGTCGXEICXXAYAACTGXC

SEQ ID NO: 3116 - protein, 20 aa, Artificial Sequence
  Synthetically generated peptide
  VARIANT (1)...(20): Xaa = Any Amino Acid
PGTCGXEICXXAYAACTGCX

SEQ ID NO: 3117 - protein, 19 aa, Artificial Sequence
  Synthetically generated peptide
  VARIANT (1)...(19): Xaa = Any Amino Acid
PGTCGXEICXAXYAACTGC

SEQ ID NO: 3118 - protein, 20 aa, Artificial Sequence
  Synthetically generated peptide
  VARIANT (1)...(20): Xaa = Any Amino Acid
PGTCGXEICXAXXYAACTGC

SEQ ID NO: 3119 - protein, 20 aa, Artificial Sequence
  Synthetically generated peptide
  VARIANT (1)...(20): Xaa = Any Amino Acid
PGTCGXEICXAXYXAACTGC

SEQ ID NO: 3120 - protein, 20 aa, Artificial Sequence
  Synthetically generated peptide
  VARIANT (1)...(20): Xaa = Any Amino Acid
PGTCGXEICXAXYAXACTGC

SEQ ID NO: 3121 - protein, 20 aa, Artificial Sequence
  Synthetically generated peptide
  VARIANT (1)...(20): Xaa = Any Amino Acid
PGTCGXEICXAXYAAXCTGC

SEQ ID NO: 3122 - protein, 20 aa, Artificial Sequence
  Synthetically generated peptide
  VARIANT (1)...(20): Xaa = Any Amino Acid
PGTCGXEICXAXYAACXTGC

SEQ ID NO: 3123 - protein, 20 aa, Artificial Sequence
  Synthetically generated peptide
  VARIANT (1)...(20): Xaa = Any Amino Acid
PGTCGXEICXAXYAACTXGC

SEQ ID NO: 3124 - protein, 20 aa, Artificial Sequence
  Synthetically generated peptide
  VARIANT (1)...(20): Xaa = Any Amino Acid
PGTCGXEICXAXYAACTGXC

SEQ ID NO: 3125 - protein, 20 aa, Artificial Sequence
  Synthetically generated peptide
  VARIANT (1)...(20): Xaa = Any Amino Acid
PGTCGXEICXAXYAACTGCX

SEQ ID NO: 3126 - protein, 19 aa, Artificial Sequence
  Synthetically generated peptide
  VARIANT (1)...(19): Xaa = Any Amino Acid
PGTCGXEICXAYXAACTGC

SEQ ID NO: 3127 - protein, 20 aa, Artificial Sequence
  Synthetically generated peptide
  VARIANT (1)...(20): Xaa = Any Amino Acid
PGTCGXEICXAYXXAACTGC

SEQ ID NO: 3128 - protein, 20 aa, Artificial Sequence
  Synthetically generated peptide
  VARIANT (1)...(20): Xaa = Any Amino Acid
PGTCGXEICXAYXAXACTGC

SEQ ID NO: 3129 - protein, 20 aa, Artificial Sequence
  Synthetically generated peptide
  VARIANT (1)...(20): Xaa = Any Amino Acid
PGTCGXEICXAYXAAXCTGC

SEQ ID NO: 3130 - protein, 20 aa, Artificial Sequence
  Synthetically generated peptide
  VARIANT (1)...(20): Xaa = Any Amino Acid
PGTCGXEICXAYXAACXTGC

SEQ ID NO: 3131 - protein, 20 aa, Artificial Sequence
  Synthetically generated peptide
  VARIANT (1)...(20): Xaa = Any Amino Acid
PGTCGXEICXAYXAACTXGC

SEQ ID NO: 3132 - protein, 20 aa, Artificial Sequence
  Synthetically generated peptide
  VARIANT (1)...(20): Xaa = Any Amino Acid
PGTCGXEICXAYXAACTGXC

SEQ ID NO: 3133 - protein, 20 aa, Artificial Sequence
  Synthetically generated peptide
  VARIANT (1)...(20): Xaa = Any Amino Acid
PGTCGXEICXAYXAACTGCX

SEQ ID NO: 3134 - protein, 19 aa, Artificial Sequence
  Synthetically generated peptide
  VARIANT (1)...(19): Xaa = Any Amino Acid
PGTCGXEICXAYAXACTGC

SEQ ID NO: 3135 - protein, 20 aa, Artificial Sequence
  Synthetically generated peptide
  VARIANT (1)...(20): Xaa = Any Amino Acid
PGTCGXEICXAYAXXACTGC

SEQ ID NO: 3136 - protein, 20 aa, Artificial Sequence
  Synthetically generated peptide
  VARIANT (1)...(20): Xaa = Any Amino Acid
PGTCGXEICXAYAXAXCTGC

SEQ ID NO: 3137 - protein, 20 aa, Artificial Sequence
  Synthetically generated peptide
  VARIANT (1)...(20): Xaa = Any Amino Acid
PGTCGXEICXAYAXACXTGC

SEQ ID NO: 3138 - protein, 20 aa, Artificial Sequence
  Synthetically generated peptide
  VARIANT (1)...(20): Xaa = Any Amino Acid
PGTCGXEICXAYAXACTXGC

SEQ ID NO: 3139 - protein, 20 aa, Artificial Sequence
  Synthetically generated peptide
  VARIANT (1)...(20): Xaa = Any Amino Acid
PGTCGXEICXAYAXACTGXC

SEQ ID NO: 3140 - protein, 20 aa, Artificial Sequence
  Synthetically generated peptide
  VARIANT (1)...(20): Xaa = Any Amino Acid
PGTCGXEICXAYAXACTGCX

SEQ ID NO: 3141 - protein, 19 aa, Artificial Sequence
  Synthetically generated peptide
  VARIANT (1)...(19): Xaa = Any Amino Acid
PGTCGXEICXAYAAXCTGC

SEQ ID NO: 3142 - protein, 20 aa, Artificial Sequence
  Synthetically generated peptide
  VARIANT (1)...(20): Xaa = Any Amino Acid
PGTCGXEICXAYAAXXCTGC

SEQ ID NO: 3143 - protein, 20 aa, Artificial Sequence
  Synthetically generated peptide
  VARIANT (1)...(20): Xaa = Any Amino Acid
PGTCGXEICXAYAAXCXTGC

SEQ ID NO: 3144 - protein, 20 aa, Artificial Sequence
  Synthetically generated peptide
  VARIANT (1)...(20): Xaa = Any Amino Acid
PGTCGXEICXAYAAXCTXGC

SEQ ID NO: 3145 - protein, 20 aa, Artificial Sequence
  Synthetically generated peptide
  VARIANT (1)...(20): Xaa = Any Amino Acid
PGTCGXEICXAYAAXCTGXC

SEQ ID NO: 3146 - protein, 20 aa, Artificial Sequence
  Synthetically generated peptide
  VARIANT (1)...(20): Xaa = Any Amino Acid
PGTCGXEICXAYAAXCTGCX

SEQ ID NO: 3147 - protein, 19 aa, Artificial Sequence
  Synthetically generated peptide
  VARIANT (1)...(19): Xaa = Any Amino Acid
PGTCGXEICXAYAACXTGC

SEQ ID NO: 3148 - protein, 20 aa, Artificial Sequence
  Synthetically generated peptide
  VARIANT (1)...(20): Xaa = Any Amino Acid
PGTCGXEICXAYAACXXTGC

SEQ ID NO: 3149 - protein, 20 aa, Artificial Sequence
  Synthetically generated peptide
  VARIANT (1)...(20): Xaa = Any Amino Acid
PGTCGXEICXAYAACXTXGC

SEQ ID NO: 3150 - protein, 20 aa, Artificial Sequence
  Synthetically generated peptide
  VARIANT (1)...(20): Xaa = Any Amino Acid
PGTCGXEICXAYAACXTGXC

SEQ ID NO: 3151 - protein, 20 aa, Artificial Sequence
  Synthetically generated peptide
  VARIANT (1)...(20): Xaa = Any Amino Acid
PGTCGXEICXAYAACXTGCX

SEQ ID NO: 3152 - protein, 19 aa, Artificial Sequence
  Synthetically generated peptide
  VARIANT (1)...(19): Xaa = Any Amino Acid
PGTCGXEICXAYAACTXGC

SEQ ID NO: 3153 - protein, 20 aa, Artificial Sequence
  Synthetically generated peptide
  VARIANT (1)...(20): Xaa = Any Amino Acid
PGTCGXEICXAYAACTXXGC

SEQ ID NO: 3154 - protein, 20 aa, Artificial Sequence
  Synthetically generated peptide
  VARIANT (1)...(20): Xaa = Any Amino Acid
PGTCGXEICXAYAACTXGXC

SEQ ID NO: 3155 - protein, 20 aa, Artificial Sequence
  Synthetically generated peptide
  VARIANT (1)...(20): Xaa = Any Amino Acid
PGTCGXEICXAYAACTXGCX

SEQ ID NO: 3156 - protein, 19 aa, Artificial Sequence
  Synthetically generated peptide
  VARIANT (1)...(19): Xaa = Any Amino Acid
PGTCGXEICXAYAACTGXC

SEQ ID NO: 3157 - protein, 20 aa, Artificial Sequence
  Synthetically generated peptide
  VARIANT (1)...(20): Xaa = Any Amino Acid
PGTCGXEICXAYAACTGXXC

SEQ ID NO: 3158 - protein, 20 aa, Artificial Sequence
  Synthetically generated peptide
  VARIANT (1)...(20): Xaa = Any Amino Acid
PGTCGXEICXAYAACTGXCX

SEQ ID NO: 3159 - protein, 19 aa, Artificial Sequence
  Synthetically generated peptide
  VARIANT (1)...(19): Xaa = Any Amino Acid
PGTCGXEICXAYAACTGCX

SEQ ID NO: 3160 - protein, 20 aa, Artificial Sequence
  Synthetically generated peptide
  VARIANT (1)...(20): Xaa = Any Amino Acid
PGTCGXEICXAYAACTGCXX

SEQ ID NO: 3161 - protein, 18 aa, Artificial Sequence
  Synthetically generated peptide
  VARIANT (1)...(18): Xaa = Any Amino Acid
PGTCGXEICAXYAACTGC

SEQ ID NO: 3162 - protein, 19 aa, Artificial Sequence
  Synthetically generated peptide
  VARIANT (1)...(19): Xaa = Any Amino Acid
PGTCGXEICAXXYAACTGC

SEQ ID NO: 3163 - protein, 20 aa, Artificial Sequence
  Synthetically generated peptide
  VARIANT (1)...(20): Xaa = Any Amino Acid
PGTCGXEICAXXXYAACTGC

SEQ ID NO: 3164 - protein, 20 aa, Artificial Sequence
  Synthetically generated peptide
  VARIANT (1)...(20): Xaa = Any Amino Acid
PGTCGXEICAXXYXAACTGC

SEQ ID NO: 3165 - protein, 20 aa, Artificial Sequence
  Synthetically generated peptide
  VARIANT (1)...(20): Xaa = Any Amino Acid
PGTCGXEICAXXYAXACTGC

SEQ ID NO: 3166 - protein, 20 aa, Artificial Sequence
  Synthetically generated peptide
  VARIANT (1)...(20): Xaa = Any Amino Acid
PGTCGXEICAXXYAAXCTGC

SEQ ID NO: 3167 - protein, 20 aa, Artificial Sequence
  Synthetically generated peptide
  VARIANT (1)...(20): Xaa = Any Amino Acid
PGTCGXEICAXXYAACXTGC

SEQ ID NO: 3168 - protein, 20 aa, Artificial Sequence
  Synthetically generated peptide
  VARIANT (1)...(20): Xaa = Any Amino Acid
PGTCGXEICAXXYAACTXGC

SEQ ID NO: 3169 - protein, 20 aa, Artificial Sequence
  Synthetically generated peptide
  VARIANT (1)...(20): Xaa = Any Amino Acid
PGTCGXEICAXXYAACTGXC

SEQ ID NO: 3170 - protein, 20 aa, Artificial Sequence
  Synthetically generated peptide
  VARIANT (1)...(20): Xaa = Any Amino Acid
PGTCGXEICAXXYAACTGCX

SEQ ID NO: 3171 - protein, 19 aa, Artificial Sequence
  Synthetically generated peptide
  VARIANT (1)...(19): Xaa = Any Amino Acid
PGTCGXEICAXYXAACTGC

SEQ ID NO: 3172 - protein, 20 aa, Artificial Sequence
  Synthetically generated peptide
  VARIANT (1)...(20): Xaa = Any Amino Acid
PGTCGXEICAXYXXAACTGC

SEQ ID NO: 3173 - protein, 20 aa, Artificial Sequence
  Synthetically generated peptide
  VARIANT (1)...(20): Xaa = Any Amino Acid
PGTCGXEICAXYXAXACTGC

SEQ ID NO: 3174 - protein, 20 aa, Artificial Sequence
  Synthetically generated peptide
  VARIANT (1)...(20): Xaa = Any Amino Acid
PGTCGXEICAXYXAAXCTGC

SEQ ID NO: 3175 - protein, 20 aa, Artificial Sequence
  Synthetically generated peptide
  VARIANT (1)...(20): Xaa = Any Amino Acid
PGTCGXEICAXYXAACXTGC

SEQ ID NO: 3176 - protein, 20 aa, Artificial Sequence
  Synthetically generated peptide
  VARIANT (1)...(20): Xaa = Any Amino Acid
PGTCGXEICAXYXAACTXGC

SEQ ID NO: 3177 - protein, 20 aa, Artificial Sequence
  Synthetically generated peptide
  VARIANT (1)...(20): Xaa = Any Amino Acid
PGTCGXEICAXYXAACTGXC

SEQ ID NO: 3178 - protein, 20 aa, Artificial Sequence
  Synthetically generated peptide
  VARIANT (1)...(20): Xaa = Any Amino Acid
PGTCGXEICAXYXAACTGCX

SEQ ID NO: 3179 - protein, 19 aa, Artificial Sequence
  Synthetically generated peptide
  VARIANT (1)...(19): Xaa = Any Amino Acid
PGTCGXEICAXYAXACTGC

SEQ ID NO: 3180 - protein, 20 aa, Artificial Sequence
  Synthetically generated peptide
  VARIANT (1)...(20): Xaa = Any Amino Acid
PGTCGXEICAXYAXXACTGC

SEQ ID NO: 3181 - protein, 20 aa, Artificial Sequence
  Synthetically generated peptide
  VARIANT (1)...(20): Xaa = Any Amino Acid
PGTCGXEICAXYAXAXCTGC

SEQ ID NO: 3182 - protein, 20 aa, Artificial Sequence
  Synthetically generated peptide
  VARIANT (1)...(20): Xaa = Any Amino Acid
PGTCGXEICAXYAXACXTGC

SEQ ID NO: 3183 - protein, 20 aa, Artificial Sequence
  Synthetically generated peptide
  VARIANT (1)...(20): Xaa = Any Amino Acid
PGTCGXEICAXYAXACTXGC

SEQ ID NO: 3184 - protein, 20 aa, Artificial Sequence
  Synthetically generated peptide
  VARIANT (1)...(20): Xaa = Any Amino Acid
PGTCGXEICAXYAXACTGXC

SEQ ID NO: 3185 - protein, 20 aa, Artificial Sequence
  Synthetically generated peptide
  VARIANT (1)...(20): Xaa = Any Amino Acid
PGTCGXEICAXYAXACTGCX

SEQ ID NO: 3186 - protein, 19 aa, Artificial Sequence
  Synthetically generated peptide
  VARIANT (1)...(19): Xaa = Any Amino Acid
PGTCGXEICAXYAAXCTGC

SEQ ID NO: 3187 - protein, 20 aa, Artificial Sequence
  Synthetically generated peptide
  VARIANT (1)...(20): Xaa = Any Amino Acid
PGTCGXEICAXYAAXXCTGC

SEQ ID NO: 3188 - protein, 20 aa, Artificial Sequence
  Synthetically generated peptide
  VARIANT (1)...(20): Xaa = Any Amino Acid
PGTCGXEICAXYAAXCXTGC

SEQ ID NO: 3189 - protein, 20 aa, Artificial Sequence
  Synthetically generated peptide
  VARIANT (1)...(20): Xaa = Any Amino Acid
PGTCGXEICAXYAAXCTXGC

SEQ ID NO: 3190 - protein, 20 aa, Artificial Sequence
  Synthetically generated peptide
  VARIANT (1)...(20): Xaa = Any Amino Acid
PGTCGXEICAXYAAXCTGXC

SEQ ID NO: 3191 - protein, 20 aa, Artificial Sequence
  Synthetically generated peptide
  VARIANT (1)...(20): Xaa = Any Amino Acid
PGTCGXEICAXYAAXCTGCX

SEQ ID NO: 3192 - protein, 19 aa, Artificial Sequence
  Synthetically generated peptide
  VARIANT (1)...(19): Xaa = Any Amino Acid
PGTCGXEICAXYAACXTGC

SEQ ID NO: 3193 - protein, 20 aa, Artificial Sequence
  Synthetically generated peptide
  VARIANT (1)...(20): Xaa = Any Amino Acid
PGTCGXEICAXYAACXXTGC

SEQ ID NO: 3194 - protein, 20 aa, Artificial Sequence
  Synthetically generated peptide
  VARIANT (1)...(20): Xaa = Any Amino Acid
PGTCGXEICAXYAACXTXGC

SEQ ID NO: 3195 - protein, 20 aa, Artificial Sequence
  Synthetically generated peptide
  VARIANT (1)...(20): Xaa = Any Amino Acid
PGTCGXEICAXYAACXTGXC

SEQ ID NO: 3196 - protein, 20 aa, Artificial Sequence
  Synthetically generated peptide
  VARIANT (1)...(20): Xaa = Any Amino Acid
PGTCGXEICAXYAACXTGCX

SEQ ID NO: 3197 - protein, 19 aa, Artificial Sequence
  Synthetically generated peptide
  VARIANT (1)...(19): Xaa = Any Amino Acid
PGTCGXEICAXYAACTXGC

SEQ ID NO: 3198 - protein, 20 aa, Artificial Sequence
  Synthetically generated peptide
  VARIANT (1)...(20): Xaa = Any Amino Acid
PGTCGXEICAXYAACTXXGC

SEQ ID NO: 3199 - protein, 20 aa, Artificial Sequence
  Synthetically generated peptide
  VARIANT (1)...(20): Xaa = Any Amino Acid
PGTCGXEICAXYAACTXGXC

SEQ ID NO: 3200 - protein, 20 aa, Artificial Sequence
  Synthetically generated peptide
  VARIANT (1)...(20): Xaa = Any Amino Acid
PGTCGXEICAXYAACTXGCX

SEQ ID NO: 3201 - protein, 19 aa, Artificial Sequence
  Synthetically generated peptide
  VARIANT (1)...(19): Xaa = Any Amino Acid
PGTCGXEICAXYAACTGXC

SEQ ID NO: 3202 - protein, 20 aa, Artificial Sequence
  Synthetically generated peptide
  VARIANT (1)...(20): Xaa = Any Amino Acid
PGTCGXEICAXYAACTGXXC

SEQ ID NO: 3203 - protein, 20 aa, Artificial Sequence
  Synthetically generated peptide
  VARIANT (1)...(20): Xaa = Any Amino Acid
PGTCGXEICAXYAACTGXCX

SEQ ID NO: 3204 - protein, 19 aa, Artificial Sequence
  Synthetically generated peptide
  VARIANT (1)...(19): Xaa = Any Amino Acid
PGTCGXEICAXYAACTGCX

SEQ ID NO: 3205 - protein, 20 aa, Artificial Sequence
  Synthetically generated peptide
  VARIANT (1)...(20): Xaa = Any Amino Acid
PGTCGXEICAXYAACTGCXX

SEQ ID NO: 3206 - protein, 18 aa, Artificial Sequence
  Synthetically generated peptide
  VARIANT (1)...(18): Xaa = Any Amino Acid
PGTCGXEICAYXAACTGC

SEQ ID NO: 3207 - protein, 19 aa, Artificial Sequence
  Synthetically generated peptide
  VARIANT (1)...(19): Xaa = Any Amino Acid
PGTCGXEICAYXXAACTGC

SEQ ID NO: 3208 - protein, 20 aa, Artificial Sequence
  Synthetically generated peptide
  VARIANT (1)...(20): Xaa = Any Amino Acid
PGTCGXEICAYXXXAACTGC

SEQ ID NO: 3209 - protein, 20 aa, Artificial Sequence
  Synthetically generated peptide
  VARIANT (1)...(20): Xaa = Any Amino Acid
PGTCGXEICAYXXAXACTGC

SEQ ID NO: 3210 - protein, 20 aa, Artificial Sequence
  Synthetically generated peptide
  VARIANT (1)...(20): Xaa = Any Amino Acid
PGTCGXEICAYXXAAXCTGC

SEQ ID NO: 3211 - protein, 20 aa, Artificial Sequence
  Synthetically generated peptide
  VARIANT (1)...(20): Xaa = Any Amino Acid
PGTCGXEICAYXXAACXTGC

SEQ ID NO: 3212 - protein, 20 aa, Artificial Sequence
  Synthetically generated peptide
  VARIANT (1)...(20): Xaa = Any Amino Acid
PGTCGXEICAYXXAACTXGC

SEQ ID NO: 3213 - protein, 20 aa, Artificial Sequence
  Synthetically generated peptide
  VARIANT (1)...(20): Xaa = Any Amino Acid
PGTCGXEICAYXXAACTGXC

SEQ ID NO: 3214 - protein, 20 aa, Artificial Sequence
  Synthetically generated peptide
  VARIANT (1)...(20): Xaa = Any Amino Acid
PGTCGXEICAYXXAACTGCX

SEQ ID NO: 3215 - protein, 19 aa, Artificial Sequence
  Synthetically generated peptide
  VARIANT (1)...(19): Xaa = Any Amino Acid
PGTCGXEICAYXAXACTGC

SEQ ID NO: 3216 - protein, 20 aa, Artificial Sequence
  Synthetically generated peptide
  VARIANT (1)...(20): Xaa = Any Amino Acid
PGTCGXEICAYXAXXACTGC

SEQ ID NO: 3217 - protein, 20 aa, Artificial Sequence
  Synthetically generated peptide
  VARIANT (1)...(20): Xaa = Any Amino Acid
PGTCGXEICAYXAXAXCTGC

SEQ ID NO: 3218 - protein, 20 aa, Artificial Sequence
  Synthetically generated peptide
  VARIANT (1)...(20): Xaa = Any Amino Acid
PGTCGXEICAYXAXACXTGC

SEQ ID NO: 3219 - protein, 20 aa, Artificial Sequence
  Synthetically generated peptide
  VARIANT (1)...(20): Xaa = Any Amino Acid
PGTCGXEICAYXAXACTXGC

SEQ ID NO: 3220 - protein, 20 aa, Artificial Sequence
  Synthetically generated peptide
  VARIANT (1)...(20): Xaa = Any Amino Acid
PGTCGXEICAYXAXACTGXC

SEQ ID NO: 3221 - protein, 20 aa, Artificial Sequence
  Synthetically generated peptide
  VARIANT (1)...(20): Xaa = Any Amino Acid
PGTCGXEICAYXAXACTGCX

SEQ ID NO: 3222 - protein, 19 aa, Artificial Sequence
  Synthetically generated peptide
  VARIANT (1)...(19): Xaa = Any Amino Acid
PGTCGXEICAYXAAXCTGC

SEQ ID NO: 3223 - protein, 20 aa, Artificial Sequence
  Synthetically generated peptide
  VARIANT (1)...(20): Xaa = Any Amino Acid
PGTCGXEICAYXAAXXCTGC

SEQ ID NO: 3224 - protein, 20 aa, Artificial Sequence
  Synthetically generated peptide
  VARIANT (1)...(20): Xaa = Any Amino Acid
PGTCGXEICAYXAAXCXTGC

SEQ ID NO: 3225 - protein, 20 aa, Artificial Sequence
  Synthetically generated peptide
  VARIANT (1)...(20): Xaa = Any Amino Acid
PGTCGXEICAYXAAXCTXGC

SEQ ID NO: 3226 - protein, 20 aa, Artificial Sequence
  Synthetically generated peptide
  VARIANT (1)...(20): Xaa = Any Amino Acid
PGTCGXEICAYXAAXCTGXC

SEQ ID NO: 3227 - protein, 20 aa, Artificial Sequence
  Synthetically generated peptide
  VARIANT (1)...(20): Xaa = Any Amino Acid
PGTCGXEICAYXAAXCTGCX

SEQ ID NO: 3228 - protein, 19 aa, Artificial Sequence
  Synthetically generated peptide
  VARIANT (1)...(19): Xaa = Any Amino Acid
PGTCGXEICAYXAACXTGC

SEQ ID NO: 3229 - protein, 20 aa, Artificial Sequence
  Synthetically generated peptide
  VARIANT (1)...(20): Xaa = Any Amino Acid
PGTCGXEICAYXAACXXTGC

SEQ ID NO: 3230 - protein, 20 aa, Artificial Sequence
  Synthetically generated peptide
  VARIANT (1)...(20): Xaa = Any Amino Acid
PGTCGXEICAYXAACXTXGC

SEQ ID NO: 3231 - protein, 20 aa, Artificial Sequence
  Synthetically generated peptide
  VARIANT (1)...(20): Xaa = Any Amino Acid
PGTCGXEICAYXAACXTGXC

SEQ ID NO: 3232 - protein, 20 aa, Artificial Sequence
  Synthetically generated peptide
  VARIANT (1)...(20): Xaa = Any Amino Acid
PGTCGXEICAYXAACXTGCX

SEQ ID NO: 3233 - protein, 19 aa, Artificial Sequence
  Synthetically generated peptide
  VARIANT (1)...(19): Xaa = Any Amino Acid
PGTCGXEICAYXAACTXGC

SEQ ID NO: 3234 - protein, 20 aa, Artificial Sequence
  Synthetically generated peptide
  VARIANT (1)...(20): Xaa = Any Amino Acid
PGTCGXEICAYXAACTXXGC

SEQ ID NO: 3235 - protein, 20 aa, Artificial Sequence
  Synthetically generated peptide
  VARIANT (1)...(20): Xaa = Any Amino Acid
PGTCGXEICAYXAACTXGXC

SEQ ID NO: 3236 - protein, 20 aa, Artificial Sequence
  Synthetically generated peptide
  VARIANT (1)...(20): Xaa = Any Amino Acid
PGTCGXEICAYXAACTXGCX

SEQ ID NO: 3237 - protein, 19 aa, Artificial Sequence
  Synthetically generated peptide
  VARIANT (1)...(19): Xaa = Any Amino Acid
PGTCGXEICAYXAACTGXC

SEQ ID NO: 3238 - protein, 20 aa, Artificial Sequence
  Synthetically generated peptide
  VARIANT (1)...(20): Xaa = Any Amino Acid
PGTCGXEICAYXAACTGXXC

SEQ ID NO: 3239 - protein, 20 aa, Artificial Sequence
  Synthetically generated peptide
  VARIANT (1)...(20): Xaa = Any Amino Acid
PGTCGXEICAYXAACTGXCX

SEQ ID NO: 3240 - protein, 19 aa, Artificial Sequence
  Synthetically generated peptide
  VARIANT (1)...(19): Xaa = Any Amino Acid
PGTCGXEICAYXAACTGCX

SEQ ID NO: 3241 - protein, 20 aa, Artificial Sequence
  Synthetically generated peptide
  VARIANT (1)...(20): Xaa = Any Amino Acid
PGTCGXEICAYXAACTGCXX

SEQ ID NO: 3242 - protein, 18 aa, Artificial Sequence
  Synthetically generated peptide
  VARIANT (1)...(18): Xaa = Any Amino Acid
PGTCGXEICAYAXACTGC

SEQ ID NO: 3243 - protein, 19 aa, Artificial Sequence
  Synthetically generated peptide
  VARIANT (1)...(19): Xaa = Any Amino Acid
PGTCGXEICAYAXXACTGC

SEQ ID NO: 3244 - protein, 20 aa, Artificial Sequence
  Synthetically generated peptide
  VARIANT (1)...(20): Xaa = Any Amino Acid
PGTCGXEICAYAXXXACTGC

SEQ ID NO: 3245 - protein, 20 aa, Artificial Sequence
  Synthetically generated peptide
  VARIANT (1)...(20): Xaa = Any Amino Acid
PGTCGXEICAYAXXAXCTGC

SEQ ID NO: 3246 - protein, 20 aa, Artificial Sequence
  Synthetically generated peptide
  VARIANT (1)...(20): Xaa = Any Amino Acid
PGTCGXEICAYAXXACXTGC

SEQ ID NO: 3247 - protein, 20 aa, Artificial Sequence
  Synthetically generated peptide
  VARIANT (1)...(20): Xaa = Any Amino Acid
PGTCGXEICAYAXXACTXGC

SEQ ID NO: 3248 - protein, 20 aa, Artificial Sequence
  Synthetically generated peptide
  VARIANT (1)...(20): Xaa = Any Amino Acid
PGTCGXEICAYAXXACTGXC

SEQ ID NO: 3249 - protein, 20 aa, Artificial Sequence
  Synthetically generated peptide
  VARIANT (1)...(20): Xaa = Any Amino Acid
PGTCGXEICAYAXXACTGCX

SEQ ID NO: 3250 - protein, 19 aa, Artificial Sequence
  Synthetically generated peptide
  VARIANT (1)...(19): Xaa = Any Amino Acid
PGTCGXEICAYAXAXCTGC

SEQ ID NO: 3251 - protein, 20 aa, Artificial Sequence
  Synthetically generated peptide
  VARIANT (1)...(20): Xaa = Any Amino Acid
PGTCGXEICAYAXAXXCTGC

SEQ ID NO: 3252 - protein, 20 aa, Artificial Sequence
  Synthetically generated peptide
  VARIANT (1)...(20): Xaa = Any Amino Acid
PGTCGXEICAYAXAXCXTGC

SEQ ID NO: 3253 - protein, 20 aa, Artificial Sequence
  Synthetically generated peptide
  VARIANT (1)...(20): Xaa = Any Amino Acid
PGTCGXEICAYAXAXCTXGC

SEQ ID NO: 3254 - protein, 20 aa, Artificial Sequence
  Synthetically generated peptide
  VARIANT (1)...(20): Xaa = Any Amino Acid
PGTCGXEICAYAXAXCTGXC

SEQ ID NO: 3255 - protein, 20 aa, Artificial Sequence
  Synthetically generated peptide
  VARIANT (1)...(20): Xaa = Any Amino Acid
PGTCGXEICAYAXAXCTGCX

SEQ ID NO: 3256 - protein, 19 aa, Artificial Sequence
  Synthetically generated peptide
  VARIANT (1)...(19): Xaa = Any Amino Acid
PGTCGXEICAYAXACXTGC

SEQ ID NO: 3257 - protein, 20 aa, Artificial Sequence
  Synthetically generated peptide
  VARIANT (1)...(20): Xaa = Any Amino Acid
PGTCGXEICAYAXACXXTGC

SEQ ID NO: 3258 - protein, 20 aa, Artificial Sequence
  Synthetically generated peptide
  VARIANT (1)...(20): Xaa = Any Amino Acid
PGTCGXEICAYAXACXTXGC

SEQ ID NO: 3259 - protein, 20 aa, Artificial Sequence
  Synthetically generated peptide
  VARIANT (1)...(20): Xaa = Any Amino Acid
PGTCGXEICAYAXACXTGXC

SEQ ID NO: 3260 - protein, 20 aa, Artificial Sequence
  Synthetically generated peptide
  VARIANT (1)...(20): Xaa = Any Amino Acid
PGTCGXEICAYAXACXTGCX

SEQ ID NO: 3261 - protein, 19 aa, Artificial Sequence
  Synthetically generated peptide
  VARIANT (1)...(19): Xaa = Any Amino Acid
PGTCGXEICAYAXACTXGC

SEQ ID NO: 3262 - protein, 20 aa, Artificial Sequence
  Synthetically generated peptide
  VARIANT (1)...(20): Xaa = Any Amino Acid
PGTCGXEICAYAXACTXXGC

SEQ ID NO: 3263 - protein, 20 aa, Artificial Sequence
  Synthetically generated peptide
  VARIANT (1)...(20): Xaa = Any Amino Acid
PGTCGXEICAYAXACTXGXC

SEQ ID NO: 3264 - protein, 20 aa, Artificial Sequence
  Synthetically generated peptide
  VARIANT (1)...(20): Xaa = Any Amino Acid
PGTCGXEICAYAXACTXGCX

SEQ ID NO: 3265 - protein, 19 aa, Artificial Sequence
  Synthetically generated peptide
  VARIANT (1)...(19): Xaa = Any Amino Acid
PGTCGXEICAYAXACTGXC

SEQ ID NO: 3266 - protein, 20 aa, Artificial Sequence
  Synthetically generated peptide
  VARIANT (1)...(20): Xaa = Any Amino Acid
PGTCGXEICAYAXACTGXXC

SEQ ID NO: 3267 - protein, 20 aa, Artificial Sequence
  Synthetically generated peptide
  VARIANT (1)...(20): Xaa = Any Amino Acid
PGTCGXEICAYAXACTGXCX

SEQ ID NO: 3268 - protein, 19 aa, Artificial Sequence
  Synthetically generated peptide
  VARIANT (1)...(19): Xaa = Any Amino Acid
PGTCGXEICAYAXACTGCX

SEQ ID NO: 3269 - protein, 20 aa, Artificial Sequence
  Synthetically generated peptide
  VARIANT (1)...(20): Xaa = Any Amino Acid
PGTCGXEICAYAXACTGCXX

SEQ ID NO: 3270 - protein, 18 aa, Artificial Sequence
  Synthetically generated peptide
  VARIANT (1)...(18): Xaa = Any Amino Acid
PGTCGXEICAYAAXCTGC

SEQ ID NO: 3271 - protein, 19 aa, Artificial Sequence
  Synthetically generated peptide
  VARIANT (1)...(19): Xaa = Any Amino Acid
PGTCGXEICAYAAXXCTGC

SEQ ID NO: 3272 - protein, 20 aa, Artificial Sequence
  Synthetically generated peptide
  VARIANT (1)...(20): Xaa = Any Amino Acid
PGTCGXEICAYAAXXXCTGC

SEQ ID NO: 3273 - protein, 20 aa, Artificial Sequence
  Synthetically generated peptide
  VARIANT (1)...(20): Xaa = Any Amino Acid
PGTCGXEICAYAAXXCXTGC

SEQ ID NO: 3274 - protein, 20 aa, Artificial Sequence
  Synthetically generated peptide
  VARIANT (1)...(20): Xaa = Any Amino Acid
PGTCGXEICAYAAXXCTXGC

SEQ ID NO: 3275 - protein, 20 aa, Artificial Sequence
  Synthetically generated peptide
  VARIANT (1)...(20): Xaa = Any Amino Acid
PGTCGXEICAYAAXXCTGXC

SEQ ID NO: 3276 - protein, 20 aa, Artificial Sequence
  Synthetically generated peptide
  VARIANT (1)...(20): Xaa = Any Amino Acid
PGTCGXEICAYAAXXCTGCX

SEQ ID NO: 3277 - protein, 19 aa, Artificial Sequence
  Synthetically generated peptide
  VARIANT (1)...(19): Xaa = Any Amino Acid
PGTCGXEICAYAAXCXTGC

SEQ ID NO: 3278 - protein, 20 aa, Artificial Sequence
  Synthetically generated peptide
  VARIANT (1)...(20): Xaa = Any Amino Acid
PGTCGXEICAYAAXCXXTGC

SEQ ID NO: 3279 - protein, 20 aa, Artificial Sequence
  Synthetically generated peptide
  VARIANT (1)...(20): Xaa = Any Amino Acid
PGTCGXEICAYAAXCXTXGC

SEQ ID NO: 3280 - protein, 20 aa, Artificial Sequence
  Synthetically generated peptide
  VARIANT (1)...(20): Xaa = Any Amino Acid
PGTCGXEICAYAAXCXTGXC

SEQ ID NO: 3281 - protein, 20 aa, Artificial Sequence
  Synthetically generated peptide
  VARIANT (1)...(20): Xaa = Any Amino Acid
PGTCGXEICAYAAXCXTGCX

SEQ ID NO: 3282 - protein, 19 aa, Artificial Sequence
  Synthetically generated peptide
  VARIANT (1)...(19): Xaa = Any Amino Acid
PGTCGXEICAYAAXCTXGC

SEQ ID NO: 3283 - protein, 20 aa, Artificial Sequence
  Synthetically generated peptide
  VARIANT (1)...(20): Xaa = Any Amino Acid
PGTCGXEICAYAAXCTXXGC

SEQ ID NO: 3284 - protein, 20 aa, Artificial Sequence
  Synthetically generated peptide
  VARIANT (1)...(20): Xaa = Any Amino Acid
PGTCGXEICAYAAXCTXGXC

SEQ ID NO: 3285 - protein, 20 aa, Artificial Sequence
  Synthetically generated peptide
  VARIANT (1)...(20): Xaa = Any Amino Acid
PGTCGXEICAYAAXCTXGCX

SEQ ID NO: 3286 - protein, 19 aa, Artificial Sequence
  Synthetically generated peptide
  VARIANT (1)...(19): Xaa = Any Amino Acid
PGTCGXEICAYAAXCTGXC

SEQ ID NO: 3287 - protein, 20 aa, Artificial Sequence
  Synthetically generated peptide
  VARIANT (1)...(20): Xaa = Any Amino Acid
PGTCGXEICAYAAXCTGXXC

SEQ ID NO: 3288 - protein, 20 aa, Artificial Sequence
  Synthetically generated peptide
  VARIANT (1)...(20): Xaa = Any Amino Acid
PGTCGXEICAYAAXCTGXCX

SEQ ID NO: 3289 - protein, 19 aa, Artificial Sequence
  Synthetically generated peptide
  VARIANT (1)...(19): Xaa = Any Amino Acid
PGTCGXEICAYAAXCTGCX

SEQ ID NO: 3290 - protein, 20 aa, Artificial Sequence
  Synthetically generated peptide
  VARIANT (1)...(20): Xaa = Any Amino Acid
PGTCGXEICAYAAXCTGCXX

SEQ ID NO: 3291 - protein, 18 aa, Artificial Sequence
  Synthetically generated peptide
  VARIANT (1)...(18): Xaa = Any Amino Acid
PGTCGXEICAYAACXTGC

SEQ ID NO: 3292 - protein, 19 aa, Artificial Sequence
  Synthetically generated peptide
  VARIANT (1)...(19): Xaa = Any Amino Acid
PGTCGXEICAYAACXXTGC

SEQ ID NO: 3293 - protein, 20 aa, Artificial Sequence
  Synthetically generated peptide
  VARIANT (1)...(20): Xaa = Any Amino Acid
PGTCGXEICAYAACXXXTGC

SEQ ID NO: 3294 - protein, 20 aa, Artificial Sequence
  Synthetically generated peptide
  VARIANT (1)...(20): Xaa = Any Amino Acid
PGTCGXEICAYAACXXTXGC

SEQ ID NO: 3295 - protein, 20 aa, Artificial Sequence
  Synthetically generated peptide
  VARIANT (1)...(20): Xaa = Any Amino Acid
PGTCGXEICAYAACXXTGXC

SEQ ID NO: 3296 - protein, 20 aa, Artificial Sequence
  Synthetically generated peptide
  VARIANT (1)...(20): Xaa = Any Amino Acid
PGTCGXEICAYAACXXTGCX

SEQ ID NO: 3297 - protein, 19 aa, Artificial Sequence
  Synthetically generated peptide
  VARIANT (1)...(19): Xaa = Any Amino Acid
PGTCGXEICAYAACXTXGC

SEQ ID NO: 3298 - protein, 20 aa, Artificial Sequence
  Synthetically generated peptide
  VARIANT (1)...(20): Xaa = Any Amino Acid
PGTCGXEICAYAACXTXXGC

SEQ ID NO: 3299 - protein, 20 aa, Artificial Sequence
  Synthetically generated peptide
  VARIANT (1)...(20): Xaa = Any Amino Acid
PGTCGXEICAYAACXTXGXC

SEQ ID NO: 3300 - protein, 20 aa, Artificial Sequence
  Synthetically generated peptide
  VARIANT (1)...(20): Xaa = Any Amino Acid
PGTCGXEICAYAACXTXGCX

SEQ ID NO: 3301 - protein, 19 aa, Artificial Sequence
  Synthetically generated peptide
  VARIANT (1)...(19): Xaa = Any Amino Acid
PGTCGXEICAYAACXTGXC

SEQ ID NO: 3302 - protein, 20 aa, Artificial Sequence
  Synthetically generated peptide
  VARIANT (1)...(20): Xaa = Any Amino Acid
PGTCGXEICAYAACXTGXXC

SEQ ID NO: 3303 - protein, 20 aa, Artificial Sequence
  Synthetically generated peptide
  VARIANT (1)...(20): Xaa = Any Amino Acid
PGTCGXEICAYAACXTGXCX

SEQ ID NO: 3304 - protein, 19 aa, Artificial Sequence
  Synthetically generated peptide
  VARIANT (1)...(19): Xaa = Any Amino Acid
PGTCGXEICAYAACXTGCX

SEQ ID NO: 3305 - protein, 20 aa, Artificial Sequence
  Synthetically generated peptide
  VARIANT (1)...(20): Xaa = Any Amino Acid
PGTCGXEICAYAACXTGCXX

SEQ ID NO: 3306 - protein, 18 aa, Artificial Sequence
  Synthetically generated peptide
  VARIANT (1)...(18): Xaa = Any Amino Acid
PGTCGXEICAYAACTXGC

SEQ ID NO: 3307 - protein, 19 aa, Artificial Sequence
  Synthetically generated peptide
  VARIANT (1)...(19): Xaa = Any Amino Acid
PGTCGXEICAYAACTXXGC

SEQ ID NO: 3308 - protein, 20 aa, Artificial Sequence
  Synthetically generated peptide
  VARIANT (1)...(20): Xaa = Any Amino Acid
PGTCGXEICAYAACTXXXGC

SEQ ID NO: 3309 - protein, 20 aa, Artificial Sequence
  Synthetically generated peptide
  VARIANT (1)...(20): Xaa = Any Amino Acid
PGTCGXEICAYAACTXXGXC

SEQ ID NO: 3310 - protein, 20 aa, Artificial Sequence
  Synthetically generated peptide
  VARIANT (1)...(20): Xaa = Any Amino Acid
PGTCGXEICAYAACTXXGCX

SEQ ID NO: 3311 - protein, 19 aa, Artificial Sequence
  Synthetically generated peptide
  VARIANT (1)...(19): Xaa = Any Amino Acid
PGTCGXEICAYAACTXGXC

SEQ ID NO: 3312 - protein, 20 aa, Artificial Sequence
  Synthetically generated peptide
  VARIANT (1)...(20): Xaa = Any Amino Acid
PGTCGXEICAYAACTXGXXC

SEQ ID NO: 3313 - protein, 20 aa, Artificial Sequence
  Synthetically generated peptide
  VARIANT (1)...(20): Xaa = Any Amino Acid
PGTCGXEICAYAACTXGXCX

SEQ ID NO: 3314 - protein, 19 aa, Artificial Sequence
  Synthetically generated peptide
  VARIANT (1)...(19): Xaa = Any Amino Acid
PGTCGXEICAYAACTXGCX

SEQ ID NO: 3315 - protein, 20 aa, Artificial Sequence
  Synthetically generated peptide
  VARIANT (1)...(20): Xaa = Any Amino Acid
PGTCGXEICAYAACTXGCXX

SEQ ID NO: 3316 - protein, 18 aa, Artificial Sequence
  Synthetically generated peptide
  VARIANT (1)...(18): Xaa = Any Amino Acid
PGTCGXEICAYAACTGXC

SEQ ID NO: 3317 - protein, 19 aa, Artificial Sequence
  Synthetically generated peptide
  VARIANT (1)...(19): Xaa = Any Amino Acid
PGTCGXEICAYAACTGXXC

SEQ ID NO: 3318 - protein, 20 aa, Artificial Sequence
  Synthetically generated peptide
  VARIANT (1)...(20): Xaa = Any Amino Acid
PGTCGXEICAYAACTGXXXC

SEQ ID NO: 3319 - protein, 20 aa, Artificial Sequence
  Synthetically generated peptide
  VARIANT (1)...(20): Xaa = Any Amino Acid
PGTCGXEICAYAACTGXXCX

SEQ ID NO: 3320 - protein, 19 aa, Artificial Sequence
  Synthetically generated peptide
  VARIANT (1)...(19): Xaa = Any Amino Acid
PGTCGXEICAYAACTGXCX

SEQ ID NO: 3321 - protein, 20 aa, Artificial Sequence
  Synthetically generated peptide
  VARIANT (1)...(20): Xaa = Any Amino Acid
PGTCGXEICAYAACTGXCXX

SEQ ID NO: 3322 - protein, 18 aa, Artificial Sequence
  Synthetically generated peptide
  VARIANT (1)...(18): Xaa = Any Amino Acid
PGTCGXEICAYAACTGCX

SEQ ID NO: 3323 - protein, 19 aa, Artificial Sequence
  Synthetically generated peptide
  VARIANT (1)...(19): Xaa = Any Amino Acid
PGTCGXEICAYAACTGCXX

SEQ ID NO: 3324 - protein, 20 aa, Artificial Sequence
  Synthetically generated peptide
  VARIANT (1)...(20): Xaa = Any Amino Acid
PGTCGXEICAYAACTGCXXX

SEQ ID NO: 3325 - protein, 17 aa, Artificial Sequence
  Synthetically generated peptide
  VARIANT (1)...(17): Xaa = Any Amino Acid
PGTCGEXICAYAACTGC

SEQ ID NO: 3326 - protein, 18 aa, Artificial Sequence
  Synthetically generated peptide
  VARIANT (1)...(18): Xaa = Any Amino Acid
PGTCGEXXICAYAACTGC

SEQ ID NO: 3327 - protein, 19 aa, Artificial Sequence
  Synthetically generated peptide
  VARIANT (1)...(19): Xaa = Any Amino Acid
PGTCGEXXXICAYAACTGC

SEQ ID NO: 3328 - protein, 20 aa, Artificial Sequence
  Synthetically generated peptide
  VARIANT (1)...(20): Xaa = Any Amino Acid
PGTCGEXXXXICAYAACTGC

SEQ ID NO: 3329 - protein, 20 aa, Artificial Sequence
  Synthetically generated peptide
  VARIANT (1)...(20): Xaa = Any Amino Acid
PGTCGEXXXIXCAYAACTGC

SEQ ID NO: 3330 - protein, 20 aa, Artificial Sequence
  Synthetically generated peptide
  VARIANT (1)...(20): Xaa = Any Amino Acid
PGTCGEXXXICXAYAACTGC

SEQ ID NO: 3331 - protein, 20 aa, Artificial Sequence
  Synthetically generated peptide
  VARIANT (1)...(20): Xaa = Any Amino Acid
PGTCGEXXXICAXYAACTGC

SEQ ID NO: 3332 - protein, 20 aa, Artificial Sequence
  Synthetically generated peptide
  VARIANT (1)...(20): Xaa = Any Amino Acid
PGTCGEXXXICAYXAACTGC

SEQ ID NO: 3333 - protein, 20 aa, Artificial Sequence
  Synthetically generated peptide
  VARIANT (1)...(20): Xaa = Any Amino Acid
PGTCGEXXXICAYAXACTGC

SEQ ID NO: 3334 - protein, 20 aa, Artificial Sequence
  Synthetically generated peptide
  VARIANT (1)...(20): Xaa = Any Amino Acid
PGTCGEXXXICAYAAXCTGC

SEQ ID NO: 3335 - protein, 20 aa, Artificial Sequence
  Synthetically generated peptide
  VARIANT (1)...(20): Xaa = Any Amino Acid
PGTCGEXXXICAYAACXTGC

SEQ ID NO: 3336 - protein, 20 aa, Artificial Sequence
  Synthetically generated peptide
  VARIANT (1)...(20): Xaa = Any Amino Acid
PGTCGEXXXICAYAACTXGC

SEQ ID NO: 3337 - protein, 20 aa, Artificial Sequence
  Synthetically generated peptide
  VARIANT (1)...(20): Xaa = Any Amino Acid
PGTCGEXXXICAYAACTGXC

SEQ ID NO: 3338 - protein, 20 aa, Artificial Sequence
  Synthetically generated peptide
  VARIANT (1)...(20): Xaa = Any Amino Acid
PGTCGEXXXICAYAACTGCX

SEQ ID NO: 3339 - protein, 19 aa, Artificial Sequence
  Synthetically generated peptide
  VARIANT (1)...(19): Xaa = Any Amino Acid
PGTCGEXXIXCAYAACTGC

SEQ ID NO: 3340 - protein, 20 aa, Artificial Sequence
  Synthetically generated peptide
  VARIANT (1)...(20): Xaa = Any Amino Acid
PGTCGEXXIXXCAYAACTGC

SEQ ID NO: 3341 - protein, 20 aa, Artificial Sequence
  Synthetically generated peptide
  VARIANT (1)...(20): Xaa = Any Amino Acid
PGTCGEXXIXCXAYAACTGC

SEQ ID NO: 3342 - protein, 20 aa, Artificial Sequence
  Synthetically generated peptide
  VARIANT (1)...(20): Xaa = Any Amino Acid
PGTCGEXXIXCAXYAACTGC

SEQ ID NO: 3343 - protein, 20 aa, Artificial Sequence
  Synthetically generated peptide
  VARIANT (1)...(20): Xaa = Any Amino Acid
PGTCGEXXIXCAYXAACTGC

SEQ ID NO: 3344 - protein, 20 aa, Artificial Sequence
  Synthetically generated peptide
  VARIANT (1)...(20): Xaa = Any Amino Acid
PGTCGEXXIXCAYAXACTGC

SEQ ID NO: 3345 - protein, 20 aa, Artificial Sequence
  Synthetically generated peptide
  VARIANT (1)...(20): Xaa = Any Amino Acid
PGTCGEXXIXCAYAAXCTGC

SEQ ID NO: 3346 - protein, 20 aa, Artificial Sequence
  Synthetically generated peptide
  VARIANT (1)...(20): Xaa = Any Amino Acid
PGTCGEXXIXCAYAACXTGC

SEQ ID NO: 3347 - protein, 20 aa, Artificial Sequence
  Synthetically generated peptide
  VARIANT (1)...(20): Xaa = Any Amino Acid
PGTCGEXXIXCAYAACTXGC

SEQ ID NO: 3348 - protein, 20 aa, Artificial Sequence
  Synthetically generated peptide
  VARIANT (1)...(20): Xaa = Any Amino Acid
PGTCGEXXIXCAYAACTGXC

SEQ ID NO: 3349 - protein, 20 aa, Artificial Sequence
  Synthetically generated peptide
  VARIANT (1)...(20): Xaa = Any Amino Acid
PGTCGEXXIXCAYAACTGCX

SEQ ID NO: 3350 - protein, 19 aa, Artificial Sequence
  Synthetically generated peptide
  VARIANT (1)...(19): Xaa = Any Amino Acid
PGTCGEXXICXAYAACTGC

SEQ ID NO: 3351 - protein, 20 aa, Artificial Sequence
  Synthetically generated peptide
  VARIANT (1)...(20): Xaa = Any Amino Acid
PGTCGEXXICXXAYAACTGC

SEQ ID NO: 3352 - protein, 20 aa, Artificial Sequence
  Synthetically generated peptide
  VARIANT (1)...(20): Xaa = Any Amino Acid
PGTCGEXXICXAXYAACTGC

SEQ ID NO: 3353 - protein, 20 aa, Artificial Sequence
  Synthetically generated peptide
  VARIANT (1)...(20): Xaa = Any Amino Acid
PGTCGEXXICXAYXAACTGC

SEQ ID NO: 3354 - protein, 20 aa, Artificial Sequence
  Synthetically generated peptide
  VARIANT (1)...(20): Xaa = Any Amino Acid
PGTCGEXXICXAYAXACTGC

SEQ ID NO: 3355 - protein, 20 aa, Artificial Sequence
  Synthetically generated peptide
  VARIANT (1)...(20): Xaa = Any Amino Acid
PGTCGEXXICXAYAAXCTGC

SEQ ID NO: 3356 - protein, 20 aa, Artificial Sequence
  Synthetically generated peptide
  VARIANT (1)...(20): Xaa = Any Amino Acid
PGTCGEXXICXAYAACXTGC

SEQ ID NO: 3357 - protein, 20 aa, Artificial Sequence
  Synthetically generated peptide
  VARIANT (1)...(20): Xaa = Any Amino Acid
PGTCGEXXICXAYAACTXGC

SEQ ID NO: 3358 - protein, 20 aa, Artificial Sequence
  Synthetically generated peptide
  VARIANT (1)...(20): Xaa = Any Amino Acid
PGTCGEXXICXAYAACTGXC

SEQ ID NO: 3359 - protein, 20 aa, Artificial Sequence
  Synthetically generated peptide
  VARIANT (1)...(20): Xaa = Any Amino Acid
PGTCGEXXICXAYAACTGCX

SEQ ID NO: 3360 - protein, 19 aa, Artificial Sequence
  Synthetically generated peptide
  VARIANT (1)...(19): Xaa = Any Amino Acid
PGTCGEXXICAXYAACTGC

SEQ ID NO: 3361 - protein, 20 aa, Artificial Sequence
  Synthetically generated peptide
  VARIANT (1)...(20): Xaa = Any Amino Acid
PGTCGEXXICAXXYAACTGC

SEQ ID NO: 3362 - protein, 20 aa, Artificial Sequence
  Synthetically generated peptide
  VARIANT (1)...(20): Xaa = Any Amino Acid
PGTCGEXXICAXYXAACTGC

SEQ ID NO: 3363 - protein, 20 aa, Artificial Sequence
  Synthetically generated peptide
  VARIANT (1)...(20): Xaa = Any Amino Acid
PGTCGEXXICAXYAXACTGC

SEQ ID NO: 3364 - protein, 20 aa, Artificial Sequence
  Synthetically generated peptide
  VARIANT (1)...(20): Xaa = Any Amino Acid
PGTCGEXXICAXYAAXCTGC

SEQ ID NO: 3365 - protein, 20 aa, Artificial Sequence
  Synthetically generated peptide
  VARIANT (1)...(20): Xaa = Any Amino Acid
PGTCGEXXICAXYAACXTGC

SEQ ID NO: 3366 - protein, 20 aa, Artificial Sequence
  Synthetically generated peptide
  VARIANT (1)...(20): Xaa = Any Amino Acid
PGTCGEXXICAXYAACTXGC

SEQ ID NO: 3367 - protein, 20 aa, Artificial Sequence
  Synthetically generated peptide
  VARIANT (1)...(20): Xaa = Any Amino Acid
PGTCGEXXICAXYAACTGXC

SEQ ID NO: 3368 - protein, 20 aa, Artificial Sequence
  Synthetically generated peptide
  VARIANT (1)...(20): Xaa = Any Amino Acid
PGTCGEXXICAXYAACTGCX

SEQ ID NO: 3369 - protein, 19 aa, Artificial Sequence
  Synthetically generated peptide
  VARIANT (1)...(19): Xaa = Any Amino Acid
PGTCGEXXICAYXAACTGC

SEQ ID NO: 3370 - protein, 20 aa, Artificial Sequence
  Synthetically generated peptide
  VARIANT (1)...(20): Xaa = Any Amino Acid
PGTCGEXXICAYXXAACTGC

SEQ ID NO: 3371 - protein, 20 aa, Artificial Sequence
  Synthetically generated peptide
  VARIANT (1)...(20): Xaa = Any Amino Acid
PGTCGEXXICAYXAXACTGC

SEQ ID NO: 3372 - protein, 20 aa, Artificial Sequence
  Synthetically generated peptide
  VARIANT (1)...(20): Xaa = Any Amino Acid
PGTCGEXXICAYXAAXCTGC

SEQ ID NO: 3373 - protein, 20 aa, Artificial Sequence
  Synthetically generated peptide
  VARIANT (1)...(20): Xaa = Any Amino Acid
PGTCGEXXICAYXAACXTGC

SEQ ID NO: 3374 - protein, 20 aa, Artificial Sequence
  Synthetically generated peptide
  VARIANT (1)...(20): Xaa = Any Amino Acid
PGTCGEXXICAYXAACTXGC

SEQ ID NO: 3375 - protein, 20 aa, Artificial Sequence
  Synthetically generated peptide
  VARIANT (1)...(20): Xaa = Any Amino Acid
PGTCGEXXICAYXAACTGXC

SEQ ID NO: 3376 - protein, 20 aa, Artificial Sequence
  Synthetically generated peptide
  VARIANT (1)...(20): Xaa = Any Amino Acid
PGTCGEXXICAYXAACTGCX

SEQ ID NO: 3377 - protein, 19 aa, Artificial Sequence
  Synthetically generated peptide
  VARIANT (1)...(19): Xaa = Any Amino Acid
PGTCGEXXICAYAXACTGC

SEQ ID NO: 3378 - protein, 20 aa, Artificial Sequence
  Synthetically generated peptide
  VARIANT (1)...(20): Xaa = Any Amino Acid
PGTCGEXXICAYAXXACTGC

SEQ ID NO: 3379 - protein, 20 aa, Artificial Sequence
  Synthetically generated peptide
  VARIANT (1)...(20): Xaa = Any Amino Acid
PGTCGEXXICAYAXAXCTGC

SEQ ID NO: 3380 - protein, 20 aa, Artificial Sequence
  Synthetically generated peptide
  VARIANT (1)...(20): Xaa = Any Amino Acid
PGTCGEXXICAYAXACXTGC

SEQ ID NO: 3381 - protein, 20 aa, Artificial Sequence
  Synthetically generated peptide
  VARIANT (1)...(20): Xaa = Any Amino Acid
PGTCGEXXICAYAXACTXGC

SEQ ID NO: 3382 - protein, 20 aa, Artificial Sequence
  Synthetically generated peptide
  VARIANT (1)...(20): Xaa = Any Amino Acid
PGTCGEXXICAYAXACTGXC

SEQ ID NO: 3383 - protein, 20 aa, Artificial Sequence
  Synthetically generated peptide
  VARIANT (1)...(20): Xaa = Any Amino Acid
PGTCGEXXICAYAXACTGCX

SEQ ID NO: 3384 - protein, 19 aa, Artificial Sequence
  Synthetically generated peptide
  VARIANT (1)...(19): Xaa = Any Amino Acid
PGTCGEXXICAYAAXCTGC

SEQ ID NO: 3385 - protein, 20 aa, Artificial Sequence
  Synthetically generated peptide
  VARIANT (1)...(20): Xaa = Any Amino Acid
PGTCGEXXICAYAAXXCTGC

SEQ ID NO: 3386 - protein, 20 aa, Artificial Sequence
  Synthetically generated peptide
  VARIANT (1)...(20): Xaa = Any Amino Acid
PGTCGEXXICAYAAXCXTGC

SEQ ID NO: 3387 - protein, 20 aa, Artificial Sequence
  Synthetically generated peptide
  VARIANT (1)...(20): Xaa = Any Amino Acid
PGTCGEXXICAYAAXCTXGC

SEQ ID NO: 3388 - protein, 20 aa, Artificial Sequence
  Synthetically generated peptide
  VARIANT (1)...(20): Xaa = Any Amino Acid
PGTCGEXXICAYAAXCTGXC

SEQ ID NO: 3389 - protein, 20 aa, Artificial Sequence
  Synthetically generated peptide
  VARIANT (1)...(20): Xaa = Any Amino Acid
PGTCGEXXICAYAAXCTGCX

SEQ ID NO: 3390 - protein, 19 aa, Artificial Sequence
  Synthetically generated peptide
  VARIANT (1)...(19): Xaa = Any Amino Acid
PGTCGEXXICAYAACXTGC

SEQ ID NO: 3391 - protein, 20 aa, Artificial Sequence
  Synthetically generated peptide
  VARIANT (1)...(20): Xaa = Any Amino Acid
PGTCGEXXICAYAACXXTGC

SEQ ID NO: 3392 - protein, 20 aa, Artificial Sequence
  Synthetically generated peptide
  VARIANT (1)...(20): Xaa = Any Amino Acid
PGTCGEXXICAYAACXTXGC

SEQ ID NO: 3393 - protein, 20 aa, Artificial Sequence
  Synthetically generated peptide
  VARIANT (1)...(20): Xaa = Any Amino Acid
PGTCGEXXICAYAACXTGXC

SEQ ID NO: 3394 - protein, 20 aa, Artificial Sequence
  Synthetically generated peptide
  VARIANT (1)...(20): Xaa = Any Amino Acid
PGTCGEXXICAYAACXTGCX

SEQ ID NO: 3395 - protein, 19 aa, Artificial Sequence
  Synthetically generated peptide
  VARIANT (1)...(19): Xaa = Any Amino Acid
PGTCGEXXICAYAACTXGC

SEQ ID NO: 3396 - protein, 20 aa, Artificial Sequence
  Synthetically generated peptide
  VARIANT (1)...(20): Xaa = Any Amino Acid
PGTCGEXXICAYAACTXXGC

SEQ ID NO: 3397 - protein, 20 aa, Artificial Sequence
  Synthetically generated peptide
  VARIANT (1)...(20): Xaa = Any Amino Acid
PGTCGEXXICAYAACTXGXC

SEQ ID NO: 3398 - protein, 20 aa, Artificial Sequence
  Synthetically generated peptide
  VARIANT (1)...(20): Xaa = Any Amino Acid
PGTCGEXXICAYAACTXGCX

SEQ ID NO: 3399 - protein, 19 aa, Artificial Sequence
  Synthetically generated peptide
  VARIANT (1)...(19): Xaa = Any Amino Acid
PGTCGEXXICAYAACTGXC

SEQ ID NO: 3400 - protein, 20 aa, Artificial Sequence
  Synthetically generated peptide
  VARIANT (1)...(20): Xaa = Any Amino Acid
PGTCGEXXICAYAACTGXXC

SEQ ID NO: 3401 - protein, 20 aa, Artificial Sequence
  Synthetically generated peptide
  VARIANT (1)...(20): Xaa = Any Amino Acid
PGTCGEXXICAYAACTGXCX

SEQ ID NO: 3402 - protein, 19 aa, Artificial Sequence
  Synthetically generated peptide
  VARIANT (1)...(19): Xaa = Any Amino Acid
PGTCGEXXICAYAACTGCX

SEQ ID NO: 3403 - protein, 20 aa, Artificial Sequence
  Synthetically generated peptide
  VARIANT (1)...(20): Xaa = Any Amino Acid
PGTCGEXXICAYAACTGCXX

SEQ ID NO: 3404 - protein, 18 aa, Artificial Sequence
  Synthetically generated peptide
  VARIANT (1)...(18): Xaa = Any Amino Acid
PGTCGEXIXCAYAACTGC

SEQ ID NO: 3405 - protein, 19 aa, Artificial Sequence
  Synthetically generated peptide
  VARIANT (1)...(19): Xaa = Any Amino Acid
PGTCGEXIXXCAYAACTGC

SEQ ID NO: 3406 - protein, 20 aa, Artificial Sequence
  Synthetically generated peptide
  VARIANT (1)...(20): Xaa = Any Amino Acid
PGTCGEXIXXXCAYAACTGC

SEQ ID NO: 3407 - protein, 20 aa, Artificial Sequence
  Synthetically generated peptide
  VARIANT (1)...(20): Xaa = Any Amino Acid
PGTCGEXIXXCXAYAACTGC

SEQ ID NO: 3408 - protein, 20 aa, Artificial Sequence
  Synthetically generated peptide
  VARIANT (1)...(20): Xaa = Any Amino Acid
PGTCGEXIXXCAXYAACTGC

SEQ ID NO: 3409 - protein, 20 aa, Artificial Sequence
  Synthetically generated peptide
  VARIANT (1)...(20): Xaa = Any Amino Acid
PGTCGEXIXXCAYXAACTGC

SEQ ID NO: 3410 - protein, 20 aa, Artificial Sequence
  Synthetically generated peptide
  VARIANT (1)...(20): Xaa = Any Amino Acid
PGTCGEXIXXCAYAXACTGC

SEQ ID NO: 3411 - protein, 20 aa, Artificial Sequence
  Synthetically generated peptide
  VARIANT (1)...(20): Xaa = Any Amino Acid
PGTCGEXIXXCAYAAXCTGC

SEQ ID NO: 3412 - protein, 20 aa, Artificial Sequence
  Synthetically generated peptide
  VARIANT (1)...(20): Xaa = Any Amino Acid
PGTCGEXIXXCAYAACXTGC

SEQ ID NO: 3413 - protein, 20 aa, Artificial Sequence
  Synthetically generated peptide
  VARIANT (1)...(20): Xaa = Any Amino Acid
PGTCGEXIXXCAYAACTXGC

SEQ ID NO: 3414 - protein, 20 aa, Artificial Sequence
  Synthetically generated peptide
  VARIANT (1)...(20): Xaa = Any Amino Acid
PGTCGEXIXXCAYAACTGXC

SEQ ID NO: 3415 - protein, 20 aa, Artificial Sequence
  Synthetically generated peptide
  VARIANT (1)...(20): Xaa = Any Amino Acid
PGTCGEXIXXCAYAACTGCX

SEQ ID NO: 3416 - protein, 19 aa, Artificial Sequence
  Synthetically generated peptide
  VARIANT (1)...(19): Xaa = Any Amino Acid
PGTCGEXIXCXAYAACTGC

SEQ ID NO: 3417 - protein, 20 aa, Artificial Sequence
  Synthetically generated peptide
  VARIANT (1)...(20): Xaa = Any Amino Acid
PGTCGEXIXCXXAYAACTGC

SEQ ID NO: 3418 - protein, 20 aa, Artificial Sequence
  Synthetically generated peptide
  VARIANT (1)...(20): Xaa = Any Amino Acid
PGTCGEXIXCXAXYAACTGC

SEQ ID NO: 3419 - protein, 20 aa, Artificial Sequence
  Synthetically generated peptide
  VARIANT (1)...(20): Xaa = Any Amino Acid
PGTCGEXIXCXAYXAACTGC

SEQ ID NO: 3420 - protein, 20 aa, Artificial Sequence
  Synthetically generated peptide
  VARIANT (1)...(20): Xaa = Any Amino Acid
PGTCGEXIXCXAYAXACTGC

SEQ ID NO: 3421 - protein, 20 aa, Artificial Sequence
  Synthetically generated peptide
  VARIANT (1)...(20): Xaa = Any Amino Acid
PGTCGEXIXCXAYAAXCTGC

SEQ ID NO: 3422 - protein, 20 aa, Artificial Sequence
  Synthetically generated peptide
  VARIANT (1)...(20): Xaa = Any Amino Acid
PGTCGEXIXCXAYAACXTGC

SEQ ID NO: 3423 - protein, 20 aa, Artificial Sequence
  Synthetically generated peptide
  VARIANT (1)...(20): Xaa = Any Amino Acid
PGTCGEXIXCXAYAACTXGC

SEQ ID NO: 3424 - protein, 20 aa, Artificial Sequence
  Synthetically generated peptide
  VARIANT (1)...(20): Xaa = Any Amino Acid
PGTCGEXIXCXAYAACTGXC

SEQ ID NO: 3425 - protein, 20 aa, Artificial Sequence
  Synthetically generated peptide
  VARIANT (1)...(20): Xaa = Any Amino Acid
PGTCGEXIXCXAYAACTGCX

SEQ ID NO: 3426 - protein, 19 aa, Artificial Sequence
  Synthetically generated peptide
  VARIANT (1)...(19): Xaa = Any Amino Acid
PGTCGEXIXCAXYAACTGC

SEQ ID NO: 3427 - protein, 20 aa, Artificial Sequence
  Synthetically generated peptide
  VARIANT (1)...(20): Xaa = Any Amino Acid
PGTCGEXIXCAXXYAACTGC

SEQ ID NO: 3428 - protein, 20 aa, Artificial Sequence
  Synthetically generated peptide
  VARIANT (1)...(20): Xaa = Any Amino Acid
PGTCGEXIXCAXYXAACTGC

SEQ ID NO: 3429 - protein, 20 aa, Artificial Sequence
  Synthetically generated peptide
  VARIANT (1)...(20): Xaa = Any Amino Acid
PGTCGEXIXCAXYAXACTGC

SEQ ID NO: 3430 - protein, 20 aa, Artificial Sequence
  Synthetically generated peptide
  VARIANT (1)...(20): Xaa = Any Amino Acid
PGTCGEXIXCAXYAAXCTGC

SEQ ID NO: 3431 - protein, 20 aa, Artificial Sequence
  Synthetically generated peptide
  VARIANT (1)...(20): Xaa = Any Amino Acid
PGTCGEXIXCAXYAACXTGC

SEQ ID NO: 3432 - protein, 20 aa, Artificial Sequence
  Synthetically generated peptide
  VARIANT (1)...(20): Xaa = Any Amino Acid
PGTCGEXIXCAXYAACTXGC

SEQ ID NO: 3433 - protein, 20 aa, Artificial Sequence
  Synthetically generated peptide
  VARIANT (1)...(20): Xaa = Any Amino Acid
PGTCGEXIXCAXYAACTGXC

SEQ ID NO: 3434 - protein, 20 aa, Artificial Sequence
  Synthetically generated peptide
  VARIANT (1)...(20): Xaa = Any Amino Acid
PGTCGEXIXCAXYAACTGCX

SEQ ID NO: 3435 - protein, 19 aa, Artificial Sequence
  Synthetically generated peptide
  VARIANT (1)...(19): Xaa = Any Amino Acid
PGTCGEXIXCAYXAACTGC

SEQ ID NO: 3436 - protein, 20 aa, Artificial Sequence
  Synthetically generated peptide
  VARIANT (1)...(20): Xaa = Any Amino Acid
PGTCGEXIXCAYXXAACTGC

SEQ ID NO: 3437 - protein, 20 aa, Artificial Sequence
  Synthetically generated peptide
  VARIANT (1)...(20): Xaa = Any Amino Acid
PGTCGEXIXCAYXAXACTGC

SEQ ID NO: 3438 - protein, 20 aa, Artificial Sequence
  Synthetically generated peptide
  VARIANT (1)...(20): Xaa = Any Amino Acid
PGTCGEXIXCAYXAAXCTGC

SEQ ID NO: 3439 - protein, 20 aa, Artificial Sequence
  Synthetically generated peptide
  VARIANT (1)...(20): Xaa = Any Amino Acid
PGTCGEXIXCAYXAACXTGC

SEQ ID NO: 3440 - protein, 20 aa, Artificial Sequence
  Synthetically generated peptide
  VARIANT (1)...(20): Xaa = Any Amino Acid
PGTCGEXIXCAYXAACTXGC

SEQ ID NO: 3441 - protein, 20 aa, Artificial Sequence
  Synthetically generated peptide
  VARIANT (1)...(20): Xaa = Any Amino Acid
PGTCGEXIXCAYXAACTGXC

SEQ ID NO: 3442 - protein, 20 aa, Artificial Sequence
  Synthetically generated peptide
  VARIANT (1)...(20): Xaa = Any Amino Acid
PGTCGEXIXCAYXAACTGCX

SEQ ID NO: 3443 - protein, 19 aa, Artificial Sequence
  Synthetically generated peptide
  VARIANT (1)...(19): Xaa = Any Amino Acid
PGTCGEXIXCAYAXACTGC

SEQ ID NO: 3444 - protein, 20 aa, Artificial Sequence
  Synthetically generated peptide
  VARIANT (1)...(20): Xaa = Any Amino Acid
PGTCGEXIXCAYAXXACTGC

SEQ ID NO: 3445 - protein, 20 aa, Artificial Sequence
  Synthetically generated peptide
  VARIANT (1)...(20): Xaa = Any Amino Acid
PGTCGEXIXCAYAXAXCTGC

SEQ ID NO: 3446 - protein, 20 aa, Artificial Sequence
  Synthetically generated peptide
  VARIANT (1)...(20): Xaa = Any Amino Acid
PGTCGEXIXCAYAXACXTGC

SEQ ID NO: 3447 - protein, 20 aa, Artificial Sequence
  Synthetically generated peptide
  VARIANT (1)...(20): Xaa = Any Amino Acid
PGTCGEXIXCAYAXACTXGC

SEQ ID NO: 3448 - protein, 20 aa, Artificial Sequence
  Synthetically generated peptide
  VARIANT (1)...(20): Xaa = Any Amino Acid
PGTCGEXIXCAYAXACTGXC

SEQ ID NO: 3449 - protein, 20 aa, Artificial Sequence
  Synthetically generated peptide
  VARIANT (1)...(20): Xaa = Any Amino Acid
PGTCGEXIXCAYAXACTGCX

SEQ ID NO: 3450 - protein, 19 aa, Artificial Sequence
  Synthetically generated peptide
  VARIANT (1)...(19): Xaa = Any Amino Acid
PGTCGEXIXCAYAAXCTGC

SEQ ID NO: 3451 - protein, 20 aa, Artificial Sequence
  Synthetically generated peptide
  VARIANT (1)...(20): Xaa = Any Amino Acid
PGTCGEXIXCAYAAXXCTGC

SEQ ID NO: 3452 - protein, 20 aa, Artificial Sequence
  Synthetically generated peptide
  VARIANT (1)...(20): Xaa = Any Amino Acid
PGTCGEXIXCAYAAXCXTGC

SEQ ID NO: 3453 - protein, 20 aa, Artificial Sequence
  Synthetically generated peptide
  VARIANT (1)...(20): Xaa = Any Amino Acid
PGTCGEXIXCAYAAXCTXGC

SEQ ID NO: 3454 - protein, 20 aa, Artificial Sequence
  Synthetically generated peptide
  VARIANT (1)...(20): Xaa = Any Amino Acid
PGTCGEXIXCAYAAXCTGXC

SEQ ID NO: 3455 - protein, 20 aa, Artificial Sequence
  Synthetically generated peptide
  VARIANT (1)...(20): Xaa = Any Amino Acid
PGTCGEXIXCAYAAXCTGCX

SEQ ID NO: 3456 - protein, 19 aa, Artificial Sequence
  Synthetically generated peptide
  VARIANT (1)...(19): Xaa = Any Amino Acid
PGTCGEXIXCAYAACXTGC

SEQ ID NO: 3457 - protein, 20 aa, Artificial Sequence
  Synthetically generated peptide
  VARIANT (1)...(20): Xaa = Any Amino Acid
PGTCGEXIXCAYAACXXTGC

SEQ ID NO: 3458 - protein, 20 aa, Artificial Sequence
  Synthetically generated peptide
  VARIANT (1)...(20): Xaa = Any Amino Acid
PGTCGEXIXCAYAACXTXGC

SEQ ID NO: 3459 - protein, 20 aa, Artificial Sequence
  Synthetically generated peptide
  VARIANT (1)...(20): Xaa = Any Amino Acid
PGTCGEXIXCAYAACXTGXC

SEQ ID NO: 3460 - protein, 20 aa, Artificial Sequence
  Synthetically generated peptide
  VARIANT (1)...(20): Xaa = Any Amino Acid
PGTCGEXIXCAYAACXTGCX

SEQ ID NO: 3461 - protein, 19 aa, Artificial Sequence
  Synthetically generated peptide
  VARIANT (1)...(19): Xaa = Any Amino Acid
PGTCGEXIXCAYAACTXGC

SEQ ID NO: 3462 - protein, 20 aa, Artificial Sequence
  Synthetically generated peptide
  VARIANT (1)...(20): Xaa = Any Amino Acid
PGTCGEXIXCAYAACTXXGC

SEQ ID NO: 3463 - protein, 20 aa, Artificial Sequence
  Synthetically generated peptide
  VARIANT (1)...(20): Xaa = Any Amino Acid
PGTCGEXIXCAYAACTXGXC

SEQ ID NO: 3464 - protein, 20 aa, Artificial Sequence
  Synthetically generated peptide
  VARIANT (1)...(20): Xaa = Any Amino Acid
PGTCGEXIXCAYAACTXGCX

SEQ ID NO: 3465 - protein, 19 aa, Artificial Sequence
  Synthetically generated peptide
  VARIANT (1)...(19): Xaa = Any Amino Acid
PGTCGEXIXCAYAACTGXC

SEQ ID NO: 3466 - protein, 20 aa, Artificial Sequence
  Synthetically generated peptide
  VARIANT (1)...(20): Xaa = Any Amino Acid
PGTCGEXIXCAYAACTGXXC

SEQ ID NO: 3467 - protein, 20 aa, Artificial Sequence
  Synthetically generated peptide
  VARIANT (1)...(20): Xaa = Any Amino Acid
PGTCGEXIXCAYAACTGXCX

SEQ ID NO: 3468 - protein, 19 aa, Artificial Sequence
  Synthetically generated peptide
  VARIANT (1)...(19): Xaa = Any Amino Acid
PGTCGEXIXCAYAACTGCX

SEQ ID NO: 3469 - protein, 20 aa, Artificial Sequence
  Synthetically generated peptide
  VARIANT (1)...(20): Xaa = Any Amino Acid
PGTCGEXIXCAYAACTGCXX

SEQ ID NO: 3470 - protein, 18 aa, Artificial Sequence
  Synthetically generated peptide
  VARIANT (1)...(18): Xaa = Any Amino Acid
PGTCGEXICXAYAACTGC

SEQ ID NO: 3471 - protein, 19 aa, Artificial Sequence
  Synthetically generated peptide
  VARIANT (1)...(19): Xaa = Any Amino Acid
PGTCGEXICXXAYAACTGC

SEQ ID NO: 3472 - protein, 20 aa, Artificial Sequence
  Synthetically generated peptide
  VARIANT (1)...(20): Xaa = Any Amino Acid
PGTCGEXICXXXAYAACTGC

SEQ ID NO: 3473 - protein, 20 aa, Artificial Sequence
  Synthetically generated peptide
  VARIANT (1)...(20): Xaa = Any Amino Acid
PGTCGEXICXXAXYAACTGC

SEQ ID NO: 3474 - protein, 20 aa, Artificial Sequence
  Synthetically generated peptide
  VARIANT (1)...(20): Xaa = Any Amino Acid
PGTCGEXICXXAYXAACTGC

SEQ ID NO: 3475 - protein, 20 aa, Artificial Sequence
  Synthetically generated peptide
  VARIANT (1)...(20): Xaa = Any Amino Acid
PGTCGEXICXXAYAXACTGC

SEQ ID NO: 3476 - protein, 20 aa, Artificial Sequence
  Synthetically generated peptide
  VARIANT (1)...(20): Xaa = Any Amino Acid
PGTCGEXICXXAYAAXCTGC

SEQ ID NO: 3477 - protein, 20 aa, Artificial Sequence
  Synthetically generated peptide
  VARIANT (1)...(20): Xaa = Any Amino Acid
PGTCGEXICXXAYAACXTGC

SEQ ID NO: 3478 - protein, 20 aa, Artificial Sequence
  Synthetically generated peptide
  VARIANT (1)...(20): Xaa = Any Amino Acid
PGTCGEXICXXAYAACTXGC

SEQ ID NO: 3479 - protein, 20 aa, Artificial Sequence
  Synthetically generated peptide
  VARIANT (1)...(20): Xaa = Any Amino Acid
PGTCGEXICXXAYAACTGXC

SEQ ID NO: 3480 - protein, 20 aa, Artificial Sequence
  Synthetically generated peptide
  VARIANT (1)...(20): Xaa = Any Amino Acid
PGTCGEXICXXAYAACTGCX

SEQ ID NO: 3481 - protein, 19 aa, Artificial Sequence
  Synthetically generated peptide
  VARIANT (1)...(19): Xaa = Any Amino Acid
PGTCGEXICXAXYAACTGC

SEQ ID NO: 3482 - protein, 20 aa, Artificial Sequence
  Synthetically generated peptide
  VARIANT (1)...(20): Xaa = Any Amino Acid
PGTCGEXICXAXXYAACTGC

SEQ ID NO: 3483 - protein, 20 aa, Artificial Sequence
  Synthetically generated peptide
  VARIANT (1)...(20): Xaa = Any Amino Acid
PGTCGEXICXAXYXAACTGC

SEQ ID NO: 3484 - protein, 20 aa, Artificial Sequence
  Synthetically generated peptide
  VARIANT (1)...(20): Xaa = Any Amino Acid
PGTCGEXICXAXYAXACTGC

SEQ ID NO: 3485 - protein, 20 aa, Artificial Sequence
  Synthetically generated peptide
  VARIANT (1)...(20): Xaa = Any Amino Acid
PGTCGEXICXAXYAAXCTGC

SEQ ID NO: 3486 - protein, 20 aa, Artificial Sequence
  Synthetically generated peptide
  VARIANT (1)...(20): Xaa = Any Amino Acid
PGTCGEXICXAXYAACXTGC

SEQ ID NO: 3487 - protein, 20 aa, Artificial Sequence
  Synthetically generated peptide
  VARIANT (1)...(20): Xaa = Any Amino Acid
PGTCGEXICXAXYAACTXGC

SEQ ID NO: 3488 - protein, 20 aa, Artificial Sequence
  Synthetically generated peptide
  VARIANT (1)...(20): Xaa = Any Amino Acid
PGTCGEXICXAXYAACTGXC

SEQ ID NO: 3489 - protein, 20 aa, Artificial Sequence
  Synthetically generated peptide
  VARIANT (1)...(20): Xaa = Any Amino Acid
PGTCGEXICXAXYAACTGCX

SEQ ID NO: 3490 - protein, 19 aa, Artificial Sequence
  Synthetically generated peptide
  VARIANT (1)...(19): Xaa = Any Amino Acid
PGTCGEXICXAYXAACTGC

SEQ ID NO: 3491 - protein, 20 aa, Artificial Sequence
  Synthetically generated peptide
  VARIANT (1)...(20): Xaa = Any Amino Acid
PGTCGEXICXAYXXAACTGC

SEQ ID NO: 3492 - protein, 20 aa, Artificial Sequence
  Synthetically generated peptide
  VARIANT (1)...(20): Xaa = Any Amino Acid
PGTCGEXICXAYXAXACTGC

SEQ ID NO: 3493 - protein, 20 aa, Artificial Sequence
  Synthetically generated peptide
  VARIANT (1)...(20): Xaa = Any Amino Acid
PGTCGEXICXAYXAAXCTGC

SEQ ID NO: 3494 - protein, 20 aa, Artificial Sequence
  Synthetically generated peptide
  VARIANT (1)...(20): Xaa = Any Amino Acid
PGTCGEXICXAYXAACXTGC

SEQ ID NO: 3495 - protein, 20 aa, Artificial Sequence
  Synthetically generated peptide
  VARIANT (1)...(20): Xaa = Any Amino Acid
PGTCGEXICXAYXAACTXGC

SEQ ID NO: 3496 - protein, 20 aa, Artificial Sequence
  Synthetically generated peptide
  VARIANT (1)...(20): Xaa = Any Amino Acid
PGTCGEXICXAYXAACTGXC

SEQ ID NO: 3497 - protein, 20 aa, Artificial Sequence
  Synthetically generated peptide
  VARIANT (1)...(20): Xaa = Any Amino Acid
PGTCGEXICXAYXAACTGCX

SEQ ID NO: 3498 - protein, 19 aa, Artificial Sequence
  Synthetically generated peptide
  VARIANT (1)...(19): Xaa = Any Amino Acid
PGTCGEXICXAYAXACTGC

SEQ ID NO: 3499 - protein, 20 aa, Artificial Sequence
  Synthetically generated peptide
  VARIANT (1)...(20): Xaa = Any Amino Acid
PGTCGEXICXAYAXXACTGC

SEQ ID NO: 3500 - protein, 20 aa, Artificial Sequence
  Synthetically generated peptide
  VARIANT (1)...(20): Xaa = Any Amino Acid
PGTCGEXICXAYAXAXCTGC

SEQ ID NO: 3501 - protein, 20 aa, Artificial Sequence
  Synthetically generated peptide
  VARIANT (1)...(20): Xaa = Any Amino Acid
PGTCGEXICXAYAXACXTGC

SEQ ID NO: 3502 - protein, 20 aa, Artificial Sequence
  Synthetically generated peptide
  VARIANT (1)...(20): Xaa = Any Amino Acid
PGTCGEXICXAYAXACTXGC

SEQ ID NO: 3503 - protein, 20 aa, Artificial Sequence
  Synthetically generated peptide
  VARIANT (1)...(20): Xaa = Any Amino Acid
PGTCGEXICXAYAXACTGXC

SEQ ID NO: 3504 - protein, 20 aa, Artificial Sequence
  Synthetically generated peptide
  VARIANT (1)...(20): Xaa = Any Amino Acid
PGTCGEXICXAYAXACTGCX

SEQ ID NO: 3505 - protein, 19 aa, Artificial Sequence
  Synthetically generated peptide
  VARIANT (1)...(19): Xaa = Any Amino Acid
PGTCGEXICXAYAAXCTGC

SEQ ID NO: 3506 - protein, 20 aa, Artificial Sequence
  Synthetically generated peptide
  VARIANT (1)...(20): Xaa = Any Amino Acid
PGTCGEXICXAYAAXXCTGC

SEQ ID NO: 3507 - protein, 20 aa, Artificial Sequence
  Synthetically generated peptide
  VARIANT (1)...(20): Xaa = Any Amino Acid
PGTCGEXICXAYAAXCXTGC

SEQ ID NO: 3508 - protein, 20 aa, Artificial Sequence
  Synthetically generated peptide
  VARIANT (1)...(20): Xaa = Any Amino Acid
PGTCGEXICXAYAAXCTXGC

SEQ ID NO: 3509 - protein, 20 aa, Artificial Sequence
  Synthetically generated peptide
  VARIANT (1)...(20): Xaa = Any Amino Acid
PGTCGEXICXAYAAXCTGXC

SEQ ID NO: 3510 - protein, 20 aa, Artificial Sequence
  Synthetically generated peptide
  VARIANT (1)...(20): Xaa = Any Amino Acid
PGTCGEXICXAYAAXCTGCX

SEQ ID NO: 3511 - protein, 19 aa, Artificial Sequence
  Synthetically generated peptide
  VARIANT (1)...(19): Xaa = Any Amino Acid
PGTCGEXICXAYAACXTGC

SEQ ID NO: 3512 - protein, 20 aa, Artificial Sequence
  Synthetically generated peptide
  VARIANT (1)...(20): Xaa = Any Amino Acid
PGTCGEXICXAYAACXXTGC

SEQ ID NO: 3513 - protein, 20 aa, Artificial Sequence
  Synthetically generated peptide
  VARIANT (1)...(20): Xaa = Any Amino Acid
PGTCGEXICXAYAACXTXGC

SEQ ID NO: 3514 - protein, 20 aa, Artificial Sequence
  Synthetically generated peptide
  VARIANT (1)...(20): Xaa = Any Amino Acid
PGTCGEXICXAYAACXTGXC

SEQ ID NO: 3515 - protein, 20 aa, Artificial Sequence
  Synthetically generated peptide
  VARIANT (1)...(20): Xaa = Any Amino Acid
PGTCGEXICXAYAACXTGCX

SEQ ID NO: 3516 - protein, 19 aa, Artificial Sequence
  Synthetically generated peptide
  VARIANT (1)...(19): Xaa = Any Amino Acid
PGTCGEXICXAYAACTXGC

SEQ ID NO: 3517 - protein, 20 aa, Artificial Sequence
  Synthetically generated peptide
  VARIANT (1)...(20): Xaa = Any Amino Acid
PGTCGEXICXAYAACTXXGC

SEQ ID NO: 3518 - protein, 20 aa, Artificial Sequence
  Synthetically generated peptide
  VARIANT (1)...(20): Xaa = Any Amino Acid
PGTCGEXICXAYAACTXGXC

SEQ ID NO: 3519 - protein, 20 aa, Artificial Sequence
  Synthetically generated peptide
  VARIANT (1)...(20): Xaa = Any Amino Acid
PGTCGEXICXAYAACTXGCX

SEQ ID NO: 3520 - protein, 19 aa, Artificial Sequence
  Synthetically generated peptide
  VARIANT (1)...(19): Xaa = Any Amino Acid
PGTCGEXICXAYAACTGXC

SEQ ID NO: 3521 - protein, 20 aa, Artificial Sequence
  Synthetically generated peptide
  VARIANT (1)...(20): Xaa = Any Amino Acid
PGTCGEXICXAYAACTGXXC

SEQ ID NO: 3522 - protein, 20 aa, Artificial Sequence
  Synthetically generated peptide
  VARIANT (1)...(20): Xaa = Any Amino Acid
PGTCGEXICXAYAACTGXCX

SEQ ID NO: 3523 - protein, 19 aa, Artificial Sequence
  Synthetically generated peptide
  VARIANT (1)...(19): Xaa = Any Amino Acid
PGTCGEXICXAYAACTGCX

SEQ ID NO: 3524 - protein, 20 aa, Artificial Sequence
  Synthetically generated peptide
  VARIANT (1)...(20): Xaa = Any Amino Acid
PGTCGEXICXAYAACTGCXX

SEQ ID NO: 3525 - protein, 18 aa, Artificial Sequence
  Synthetically generated peptide
  VARIANT (1)...(18): Xaa = Any Amino Acid
PGTCGEXICAXYAACTGC

SEQ ID NO: 3526 - protein, 19 aa, Artificial Sequence
  Synthetically generated peptide
  VARIANT (1)...(19): Xaa = Any Amino Acid
PGTCGEXICAXXYAACTGC

SEQ ID NO: 3527 - protein, 20 aa, Artificial Sequence
  Synthetically generated peptide
  VARIANT (1)...(20): Xaa = Any Amino Acid
PGTCGEXICAXXXYAACTGC

SEQ ID NO: 3528 - protein, 20 aa, Artificial Sequence
  Synthetically generated peptide
  VARIANT (1)...(20): Xaa = Any Amino Acid
PGTCGEXICAXXYXAACTGC

SEQ ID NO: 3529 - protein, 20 aa, Artificial Sequence
  Synthetically generated peptide
  VARIANT (1)...(20): Xaa = Any Amino Acid
PGTCGEXICAXXYAXACTGC

SEQ ID NO: 3530 - protein, 20 aa, Artificial Sequence
  Synthetically generated peptide
  VARIANT (1)...(20): Xaa = Any Amino Acid
PGTCGEXICAXXYAAXCTGC

SEQ ID NO: 3531 - protein, 20 aa, Artificial Sequence
  Synthetically generated peptide
  VARIANT (1)...(20): Xaa = Any Amino Acid
PGTCGEXICAXXYAACXTGC

SEQ ID NO: 3532 - protein, 20 aa, Artificial Sequence
  Synthetically generated peptide
  VARIANT (1)...(20): Xaa = Any Amino Acid
PGTCGEXICAXXYAACTXGC

SEQ ID NO: 3533 - protein, 20 aa, Artificial Sequence
  Synthetically generated peptide
  VARIANT (1)...(20): Xaa = Any Amino Acid
PGTCGEXICAXXYAACTGXC

SEQ ID NO: 3534 - protein, 20 aa, Artificial Sequence
  Synthetically generated peptide
  VARIANT (1)...(20): Xaa = Any Amino Acid
PGTCGEXICAXXYAACTGCX

SEQ ID NO: 3535 - protein, 19 aa, Artificial Sequence
  Synthetically generated peptide
  VARIANT (1)...(19): Xaa = Any Amino Acid
PGTCGEXICAXYXAACTGC

SEQ ID NO: 3536 - protein, 20 aa, Artificial Sequence
  Synthetically generated peptide
  VARIANT (1)...(20): Xaa = Any Amino Acid
PGTCGEXICAXYXXAACTGC

SEQ ID NO: 3537 - protein, 20 aa, Artificial Sequence
  Synthetically generated peptide
  VARIANT (1)...(20): Xaa = Any Amino Acid
PGTCGEXICAXYXAXACTGC

SEQ ID NO: 3538 - protein, 20 aa, Artificial Sequence
  Synthetically generated peptide
  VARIANT (1)...(20): Xaa = Any Amino Acid
PGTCGEXICAXYXAAXCTGC

SEQ ID NO: 3539 - protein, 20 aa, Artificial Sequence
  Synthetically generated peptide
  VARIANT (1)...(20): Xaa = Any Amino Acid
PGTCGEXICAXYXAACXTGC

SEQ ID NO: 3540 - protein, 20 aa, Artificial Sequence
  Synthetically generated peptide
  VARIANT (1)...(20): Xaa = Any Amino Acid
PGTCGEXICAXYXAACTXGC

SEQ ID NO: 3541 - protein, 20 aa, Artificial Sequence
  Synthetically generated peptide
  VARIANT (1)...(20): Xaa = Any Amino Acid
PGTCGEXICAXYXAACTGXC

SEQ ID NO: 3542 - protein, 20 aa, Artificial Sequence
  Synthetically generated peptide
  VARIANT (1)...(20): Xaa = Any Amino Acid
PGTCGEXICAXYXAACTGCX

SEQ ID NO: 3543 - protein, 19 aa, Artificial Sequence
  Synthetically generated peptide
  VARIANT (1)...(19): Xaa = Any Amino Acid
PGTCGEXICAXYAXACTGC

SEQ ID NO: 3544 - protein, 20 aa, Artificial Sequence
  Synthetically generated peptide
  VARIANT (1)...(20): Xaa = Any Amino Acid
PGTCGEXICAXYAXXACTGC

SEQ ID NO: 3545 - protein, 20 aa, Artificial Sequence
  Synthetically generated peptide
  VARIANT (1)...(20): Xaa = Any Amino Acid
PGTCGEXICAXYAXAXCTGC

SEQ ID NO: 3546 - protein, 20 aa, Artificial Sequence
  Synthetically generated peptide
  VARIANT (1)...(20): Xaa = Any Amino Acid
PGTCGEXICAXYAXACXTGC

SEQ ID NO: 3547 - protein, 20 aa, Artificial Sequence
  Synthetically generated peptide
  VARIANT (1)...(20): Xaa = Any Amino Acid
PGTCGEXICAXYAXACTXGC

SEQ ID NO: 3548 - protein, 20 aa, Artificial Sequence
  Synthetically generated peptide
  VARIANT (1)...(20): Xaa = Any Amino Acid
PGTCGEXICAXYAXACTGXC

SEQ ID NO: 3549 - protein, 20 aa, Artificial Sequence
  Synthetically generated peptide
  VARIANT (1)...(20): Xaa = Any Amino Acid
PGTCGEXICAXYAXACTGCX

SEQ ID NO: 3550 - protein, 19 aa, Artificial Sequence
  Synthetically generated peptide
  VARIANT (1)...(19): Xaa = Any Amino Acid
PGTCGEXICAXYAAXCTGC

SEQ ID NO: 3551 - protein, 20 aa, Artificial Sequence
  Synthetically generated peptide
  VARIANT (1)...(20): Xaa = Any Amino Acid
PGTCGEXICAXYAAXXCTGC

SEQ ID NO: 3552 - protein, 20 aa, Artificial Sequence
  Synthetically generated peptide
  VARIANT (1)...(20): Xaa = Any Amino Acid
PGTCGEXICAXYAAXCXTGC

SEQ ID NO: 3553 - protein, 20 aa, Artificial Sequence
  Synthetically generated peptide
  VARIANT (1)...(20): Xaa = Any Amino Acid
PGTCGEXICAXYAAXCTXGC

SEQ ID NO: 3554 - protein, 20 aa, Artificial Sequence
  Synthetically generated peptide
  VARIANT (1)...(20): Xaa = Any Amino Acid
PGTCGEXICAXYAAXCTGXC

SEQ ID NO: 3555 - protein, 20 aa, Artificial Sequence
  Synthetically generated peptide
  VARIANT (1)...(20): Xaa = Any Amino Acid
PGTCGEXICAXYAAXCTGCX

SEQ ID NO: 3556 - protein, 19 aa, Artificial Sequence
  Synthetically generated peptide
  VARIANT (1)...(19): Xaa = Any Amino Acid
PGTCGEXICAXYAACXTGC

SEQ ID NO: 3557 - protein, 20 aa, Artificial Sequence
  Synthetically generated peptide
  VARIANT (1)...(20): Xaa = Any Amino Acid
PGTCGEXICAXYAACXXTGC

SEQ ID NO: 3558 - protein, 20 aa, Artificial Sequence
  Synthetically generated peptide
  VARIANT (1)...(20): Xaa = Any Amino Acid
PGTCGEXICAXYAACXTXGC

SEQ ID NO: 3559 - protein, 20 aa, Artificial Sequence
  Synthetically generated peptide
  VARIANT (1)...(20): Xaa = Any Amino Acid
PGTCGEXICAXYAACXTGXC

SEQ ID NO: 3560 - protein, 20 aa, Artificial Sequence
  Synthetically generated peptide
  VARIANT (1)...(20): Xaa = Any Amino Acid
PGTCGEXICAXYAACXTGCX

SEQ ID NO: 3561 - protein, 19 aa, Artificial Sequence
  Synthetically generated peptide
  VARIANT (1)...(19): Xaa = Any Amino Acid
PGTCGEXICAXYAACTXGC

SEQ ID NO: 3562 - protein, 20 aa, Artificial Sequence
  Synthetically generated peptide
  VARIANT (1)...(20): Xaa = Any Amino Acid
PGTCGEXICAXYAACTXXGC

SEQ ID NO: 3563 - protein, 20 aa, Artificial Sequence
  Synthetically generated peptide
  VARIANT (1)...(20): Xaa = Any Amino Acid
PGTCGEXICAXYAACTXGXC

SEQ ID NO: 3564 - protein, 20 aa, Artificial Sequence
  Synthetically generated peptide
  VARIANT (1)...(20): Xaa = Any Amino Acid
PGTCGEXICAXYAACTXGCX

SEQ ID NO: 3565 - protein, 19 aa, Artificial Sequence
  Synthetically generated peptide
  VARIANT (1)...(19): Xaa = Any Amino Acid
PGTCGEXICAXYAACTGXC

SEQ ID NO: 3566 - protein, 20 aa, Artificial Sequence
  Synthetically generated peptide
  VARIANT (1)...(20): Xaa = Any Amino Acid
PGTCGEXICAXYAACTGXXC

SEQ ID NO: 3567 - protein, 20 aa, Artificial Sequence
  Synthetically generated peptide
  VARIANT (1)...(20): Xaa = Any Amino Acid
PGTCGEXICAXYAACTGXCX

SEQ ID NO: 3568 - protein, 19 aa, Artificial Sequence
  Synthetically generated peptide
  VARIANT (1)...(19): Xaa = Any Amino Acid
PGTCGEXICAXYAACTGCX

SEQ ID NO: 3569 - protein, 20 aa, Artificial Sequence
  Synthetically generated peptide
  VARIANT (1)...(20): Xaa = Any Amino Acid
PGTCGEXICAXYAACTGCXX

SEQ ID NO: 3570 - protein, 18 aa, Artificial Sequence
  Synthetically generated peptide
  VARIANT (1)...(18): Xaa = Any Amino Acid
PGTCGEXICAYXAACTGC

SEQ ID NO: 3571 - protein, 19 aa, Artificial Sequence
  Synthetically generated peptide
  VARIANT (1)...(19): Xaa = Any Amino Acid
PGTCGEXICAYXXAACTGC

SEQ ID NO: 3572 - protein, 20 aa, Artificial Sequence
  Synthetically generated peptide
  VARIANT (1)...(20): Xaa = Any Amino Acid
PGTCGEXICAYXXXAACTGC

SEQ ID NO: 3573 - protein, 20 aa, Artificial Sequence
  Synthetically generated peptide
  VARIANT (1)...(20): Xaa = Any Amino Acid
PGTCGEXICAYXXAXACTGC

SEQ ID NO: 3574 - protein, 20 aa, Artificial Sequence
  Synthetically generated peptide
  VARIANT (1)...(20): Xaa = Any Amino Acid
PGTCGEXICAYXXAAXCTGC

SEQ ID NO: 3575 - protein, 20 aa, Artificial Sequence
  Synthetically generated peptide
  VARIANT (1)...(20): Xaa = Any Amino Acid
PGTCGEXICAYXXAACXTGC

SEQ ID NO: 3576 - protein, 20 aa, Artificial Sequence
  Synthetically generated peptide
  VARIANT (1)...(20): Xaa = Any Amino Acid
PGTCGEXICAYXXAACTXGC

SEQ ID NO: 3577 - protein, 20 aa, Artificial Sequence
  Synthetically generated peptide
  VARIANT (1)...(20): Xaa = Any Amino Acid
PGTCGEXICAYXXAACTGXC

SEQ ID NO: 3578 - protein, 20 aa, Artificial Sequence
  Synthetically generated peptide
  VARIANT (1)...(20): Xaa = Any Amino Acid
PGTCGEXICAYXXAACTGCX

SEQ ID NO: 3579 - protein, 19 aa, Artificial Sequence
  Synthetically generated peptide
  VARIANT (1)...(19): Xaa = Any Amino Acid
PGTCGEXICAYXAXACTGC

SEQ ID NO: 3580 - protein, 20 aa, Artificial Sequence
  Synthetically generated peptide
  VARIANT (1)...(20): Xaa = Any Amino Acid
PGTCGEXICAYXAXXACTGC

SEQ ID NO: 3581 - protein, 20 aa, Artificial Sequence
  Synthetically generated peptide
  VARIANT (1)...(20): Xaa = Any Amino Acid
PGTCGEXICAYXAXAXCTGC

SEQ ID NO: 3582 - protein, 20 aa, Artificial Sequence
  Synthetically generated peptide
  VARIANT (1)...(20): Xaa = Any Amino Acid
PGTCGEXICAYXAXACXTGC

SEQ ID NO: 3583 - protein, 20 aa, Artificial Sequence
  Synthetically generated peptide
  VARIANT (1)...(20): Xaa = Any Amino Acid
PGTCGEXICAYXAXACTXGC

SEQ ID NO: 3584 - protein, 20 aa, Artificial Sequence
  Synthetically generated peptide
  VARIANT (1)...(20): Xaa = Any Amino Acid
PGTCGEXICAYXAXACTGXC

SEQ ID NO: 3585 - protein, 20 aa, Artificial Sequence
  Synthetically generated peptide
  VARIANT (1)...(20): Xaa = Any Amino Acid
PGTCGEXICAYXAXACTGCX

SEQ ID NO: 3586 - protein, 19 aa, Artificial Sequence
  Synthetically generated peptide
  VARIANT (1)...(19): Xaa = Any Amino Acid
PGTCGEXICAYXAAXCTGC

SEQ ID NO: 3587 - protein, 20 aa, Artificial Sequence
  Synthetically generated peptide
  VARIANT (1)...(20): Xaa = Any Amino Acid
PGTCGEXICAYXAAXXCTGC

SEQ ID NO: 3588 - protein, 20 aa, Artificial Sequence
  Synthetically generated peptide
  VARIANT (1)...(20): Xaa = Any Amino Acid
PGTCGEXICAYXAAXCXTGC

SEQ ID NO: 3589 - protein, 20 aa, Artificial Sequence
  Synthetically generated peptide
  VARIANT (1)...(20): Xaa = Any Amino Acid
PGTCGEXICAYXAAXCTXGC

SEQ ID NO: 3590 - protein, 20 aa, Artificial Sequence
  Synthetically generated peptide
  VARIANT (1)...(20): Xaa = Any Amino Acid
PGTCGEXICAYXAAXCTGXC

SEQ ID NO: 3591 - protein, 20 aa, Artificial Sequence
  Synthetically generated peptide
  VARIANT (1)...(20): Xaa = Any Amino Acid
PGTCGEXICAYXAAXCTGCX

SEQ ID NO: 3592 - protein, 19 aa, Artificial Sequence
  Synthetically generated peptide
  VARIANT (1)...(19): Xaa = Any Amino Acid
PGTCGEXICAYXAACXTGC

SEQ ID NO: 3593 - protein, 20 aa, Artificial Sequence
  Synthetically generated peptide
  VARIANT (1)...(20): Xaa = Any Amino Acid
PGTCGEXICAYXAACXXTGC

SEQ ID NO: 3594 - protein, 20 aa, Artificial Sequence
  Synthetically generated peptide
  VARIANT (1)...(20): Xaa = Any Amino Acid
PGTCGEXICAYXAACXTXGC

SEQ ID NO: 3595 - protein, 20 aa, Artificial Sequence
  Synthetically generated peptide
  VARIANT (1)...(20): Xaa = Any Amino Acid
PGTCGEXICAYXAACXTGXC

SEQ ID NO: 3596 - protein, 20 aa, Artificial Sequence
  Synthetically generated peptide
  VARIANT (1)...(20): Xaa = Any Amino Acid
PGTCGEXICAYXAACXTGCX

SEQ ID NO: 3597 - protein, 19 aa, Artificial Sequence
  Synthetically generated peptide
  VARIANT (1)...(19): Xaa = Any Amino Acid
PGTCGEXICAYXAACTXGC

SEQ ID NO: 3598 - protein, 20 aa, Artificial Sequence
  Synthetically generated peptide
  VARIANT (1)...(20): Xaa = Any Amino Acid
PGTCGEXICAYXAACTXXGC

SEQ ID NO: 3599 - protein, 20 aa, Artificial Sequence
  Synthetically generated peptide
  VARIANT (1)...(20): Xaa = Any Amino Acid
PGTCGEXICAYXAACTXGXC

SEQ ID NO: 3600 - protein, 20 aa, Artificial Sequence
  Synthetically generated peptide
  VARIANT (1)...(20): Xaa = Any Amino Acid
PGTCGEXICAYXAACTXGCX

SEQ ID NO: 3601 - protein, 19 aa, Artificial Sequence
  Synthetically generated peptide
  VARIANT (1)...(19): Xaa = Any Amino Acid
PGTCGEXICAYXAACTGXC

SEQ ID NO: 3602 - protein, 20 aa, Artificial Sequence
  Synthetically generated peptide
  VARIANT (1)...(20): Xaa = Any Amino Acid
PGTCGEXICAYXAACTGXXC

SEQ ID NO: 3603 - protein, 20 aa, Artificial Sequence
  Synthetically generated peptide
  VARIANT (1)...(20): Xaa = Any Amino Acid
PGTCGEXICAYXAACTGXCX

SEQ ID NO: 3604 - protein, 19 aa, Artificial Sequence
  Synthetically generated peptide
  VARIANT (1)...(19): Xaa = Any Amino Acid
PGTCGEXICAYXAACTGCX

SEQ ID NO: 3605 - protein, 20 aa, Artificial Sequence
  Synthetically generated peptide
  VARIANT (1)...(20): Xaa = Any Amino Acid
PGTCGEXICAYXAACTGCXX

SEQ ID NO: 3606 - protein, 18 aa, Artificial Sequence
  Synthetically generated peptide
  VARIANT (1)...(18): Xaa = Any Amino Acid
PGTCGEXICAYAXACTGC

SEQ ID NO: 3607 - protein, 19 aa, Artificial Sequence
  Synthetically generated peptide
  VARIANT (1)...(19): Xaa = Any Amino Acid
PGTCGEXICAYAXXACTGC

SEQ ID NO: 3608 - protein, 20 aa, Artificial Sequence
  Synthetically generated peptide
  VARIANT (1)...(20): Xaa = Any Amino Acid
PGTCGEXICAYAXXXACTGC

SEQ ID NO: 3609 - protein, 20 aa, Artificial Sequence
  Synthetically generated peptide
  VARIANT (1)...(20): Xaa = Any Amino Acid
PGTCGEXICAYAXXAXCTGC

SEQ ID NO: 3610 - protein, 20 aa, Artificial Sequence
  Synthetically generated peptide
  VARIANT (1)...(20): Xaa = Any Amino Acid
PGTCGEXICAYAXXACXTGC

SEQ ID NO: 3611 - protein, 20 aa, Artificial Sequence
  Synthetically generated peptide
  VARIANT (1)...(20): Xaa = Any Amino Acid
PGTCGEXICAYAXXACTXGC

SEQ ID NO: 3612 - protein, 20 aa, Artificial Sequence
  Synthetically generated peptide
  VARIANT (1)...(20): Xaa = Any Amino Acid
PGTCGEXICAYAXXACTGXC

SEQ ID NO: 3613 - protein, 20 aa, Artificial Sequence
  Synthetically generated peptide
  VARIANT (1)...(20): Xaa = Any Amino Acid
PGTCGEXICAYAXXACTGCX

SEQ ID NO: 3614 - protein, 19 aa, Artificial Sequence
  Synthetically generated peptide
  VARIANT (1)...(19): Xaa = Any Amino Acid
PGTCGEXICAYAXAXCTGC

SEQ ID NO: 3615 - protein, 20 aa, Artificial Sequence
  Synthetically generated peptide
  VARIANT (1)...(20): Xaa = Any Amino Acid
PGTCGEXICAYAXAXXCTGC

SEQ ID NO: 3616 - protein, 20 aa, Artificial Sequence
  Synthetically generated peptide
  VARIANT (1)...(20): Xaa = Any Amino Acid
PGTCGEXICAYAXAXCXTGC

SEQ ID NO: 3617 - protein, 20 aa, Artificial Sequence
  Synthetically generated peptide
  VARIANT (1)...(20): Xaa = Any Amino Acid
PGTCGEXICAYAXAXCTXGC

SEQ ID NO: 3618 - protein, 20 aa, Artificial Sequence
  Synthetically generated peptide
  VARIANT (1)...(20): Xaa = Any Amino Acid
PGTCGEXICAYAXAXCTGXC

SEQ ID NO: 3619 - protein, 20 aa, Artificial Sequence
  Synthetically generated peptide
  VARIANT (1)...(20): Xaa = Any Amino Acid
PGTCGEXICAYAXAXCTGCX

SEQ ID NO: 3620 - protein, 19 aa, Artificial Sequence
  Synthetically generated peptide
  VARIANT (1)...(19): Xaa = Any Amino Acid
PGTCGEXICAYAXACXTGC

SEQ ID NO: 3621 - protein, 20 aa, Artificial Sequence
  Synthetically generated peptide
  VARIANT (1)...(20): Xaa = Any Amino Acid
PGTCGEXICAYAXACXXTGC

SEQ ID NO: 3622 - protein, 20 aa, Artificial Sequence
  Synthetically generated peptide
  VARIANT (1)...(20): Xaa = Any Amino Acid
PGTCGEXICAYAXACXTXGC

SEQ ID NO: 3623 - protein, 20 aa, Artificial Sequence
  Synthetically generated peptide
  VARIANT (1)...(20): Xaa = Any Amino Acid
PGTCGEXICAYAXACXTGXC

SEQ ID NO: 3624 - protein, 20 aa, Artificial Sequence
  Synthetically generated peptide
  VARIANT (1)...(20): Xaa = Any Amino Acid
PGTCGEXICAYAXACXTGCX

SEQ ID NO: 3625 - protein, 19 aa, Artificial Sequence
  Synthetically generated peptide
  VARIANT (1)...(19): Xaa = Any Amino Acid
PGTCGEXICAYAXACTXGC

SEQ ID NO: 3626 - protein, 20 aa, Artificial Sequence
  Synthetically generated peptide
  VARIANT (1)...(20): Xaa = Any Amino Acid
PGTCGEXICAYAXACTXXGC

SEQ ID NO: 3627 - protein, 20 aa, Artificial Sequence
  Synthetically generated peptide
  VARIANT (1)...(20): Xaa = Any Amino Acid
PGTCGEXICAYAXACTXGXC

SEQ ID NO: 3628 - protein, 20 aa, Artificial Sequence
  Synthetically generated peptide
  VARIANT (1)...(20): Xaa = Any Amino Acid
PGTCGEXICAYAXACTXGCX

SEQ ID NO: 3629 - protein, 19 aa, Artificial Sequence
  Synthetically generated peptide
  VARIANT (1)...(19): Xaa = Any Amino Acid
PGTCGEXICAYAXACTGXC

SEQ ID NO: 3630 - protein, 20 aa, Artificial Sequence
  Synthetically generated peptide
  VARIANT (1)...(20): Xaa = Any Amino Acid
PGTCGEXICAYAXACTGXXC

SEQ ID NO: 3631 - protein, 20 aa, Artificial Sequence
  Synthetically generated peptide
  VARIANT (1)...(20): Xaa = Any Amino Acid
PGTCGEXICAYAXACTGXCX

SEQ ID NO: 3632 - protein, 19 aa, Artificial Sequence
  Synthetically generated peptide
  VARIANT (1)...(19): Xaa = Any Amino Acid
PGTCGEXICAYAXACTGCX

SEQ ID NO: 3633 - protein, 20 aa, Artificial Sequence
  Synthetically generated peptide
  VARIANT (1)...(20): Xaa = Any Amino Acid
PGTCGEXICAYAXACTGCXX

SEQ ID NO: 3634 - protein, 18 aa, Artificial Sequence
  Synthetically generated peptide
  VARIANT (1)...(18): Xaa = Any Amino Acid
PGTCGEXICAYAAXCTGC

SEQ ID NO: 3635 - protein, 19 aa, Artificial Sequence
  Synthetically generated peptide
  VARIANT (1)...(19): Xaa = Any Amino Acid
PGTCGEXICAYAAXXCTGC

SEQ ID NO: 3636 - protein, 20 aa, Artificial Sequence
  Synthetically generated peptide
  VARIANT (1)...(20): Xaa = Any Amino Acid
PGTCGEXICAYAAXXXCTGC

SEQ ID NO: 3637 - protein, 20 aa, Artificial Sequence
  Synthetically generated peptide
  VARIANT (1)...(20): Xaa = Any Amino Acid
PGTCGEXICAYAAXXCXTGC

SEQ ID NO: 3638 - protein, 20 aa, Artificial Sequence
  Synthetically generated peptide
  VARIANT (1)...(20): Xaa = Any Amino Acid
PGTCGEXICAYAAXXCTXGC

SEQ ID NO: 3639 - protein, 20 aa, Artificial Sequence
  Synthetically generated peptide
  VARIANT (1)...(20): Xaa = Any Amino Acid
PGTCGEXICAYAAXXCTGXC

SEQ ID NO: 3640 - protein, 20 aa, Artificial Sequence
  Synthetically generated peptide
  VARIANT (1)...(20): Xaa = Any Amino Acid
PGTCGEXICAYAAXXCTGCX

SEQ ID NO: 3641 - protein, 19 aa, Artificial Sequence
  Synthetically generated peptide
  VARIANT (1)...(19): Xaa = Any Amino Acid
PGTCGEXICAYAAXCXTGC

SEQ ID NO: 3642 - protein, 20 aa, Artificial Sequence
  Synthetically generated peptide
  VARIANT (1)...(20): Xaa = Any Amino Acid
PGTCGEXICAYAAXCXXTGC

SEQ ID NO: 3643 - protein, 20 aa, Artificial Sequence
  Synthetically generated peptide
  VARIANT (1)...(20): Xaa = Any Amino Acid
PGTCGEXICAYAAXCXTXGC

SEQ ID NO: 3644 - protein, 20 aa, Artificial Sequence
  Synthetically generated peptide
  VARIANT (1)...(20): Xaa = Any Amino Acid
PGTCGEXICAYAAXCXTGXC

SEQ ID NO: 3645 - protein, 20 aa, Artificial Sequence
  Synthetically generated peptide
  VARIANT (1)...(20): Xaa = Any Amino Acid
PGTCGEXICAYAAXCXTGCX

SEQ ID NO: 3646 - protein, 19 aa, Artificial Sequence
  Synthetically generated peptide
  VARIANT (1)...(19): Xaa = Any Amino Acid
PGTCGEXICAYAAXCTXGC

SEQ ID NO: 3647 - protein, 20 aa, Artificial Sequence
  Synthetically generated peptide
  VARIANT (1)...(20): Xaa = Any Amino Acid
PGTCGEXICAYAAXCTXXGC

SEQ ID NO: 3648 - protein, 20 aa, Artificial Sequence
  Synthetically generated peptide
  VARIANT (1)...(20): Xaa = Any Amino Acid
PGTCGEXICAYAAXCTXGXC

SEQ ID NO: 3649 - protein, 20 aa, Artificial Sequence
  Synthetically generated peptide
  VARIANT (1)...(20): Xaa = Any Amino Acid
PGTCGEXICAYAAXCTXGCX

SEQ ID NO: 3650 - protein, 19 aa, Artificial Sequence
  Synthetically generated peptide
  VARIANT (1)...(19): Xaa = Any Amino Acid
PGTCGEXICAYAAXCTGXC

SEQ ID NO: 3651 - protein, 20 aa, Artificial Sequence
  Synthetically generated peptide
  VARIANT (1)...(20): Xaa = Any Amino Acid
PGTCGEXICAYAAXCTGXXC

SEQ ID NO: 3652 - protein, 20 aa, Artificial Sequence
  Synthetically generated peptide
  VARIANT (1)...(20): Xaa = Any Amino Acid
PGTCGEXICAYAAXCTGXCX

SEQ ID NO: 3653 - protein, 19 aa, Artificial Sequence
  Synthetically generated peptide
  VARIANT (1)...(19): Xaa = Any Amino Acid
PGTCGEXICAYAAXCTGCX

SEQ ID NO: 3654 - protein, 20 aa, Artificial Sequence
  Synthetically generated peptide
  VARIANT (1)...(20): Xaa = Any Amino Acid
PGTCGEXICAYAAXCTGCXX

SEQ ID NO: 3655 - protein, 18 aa, Artificial Sequence
  Synthetically generated peptide
  VARIANT (1)...(18): Xaa = Any Amino Acid
PGTCGEXICAYAACXTGC

SEQ ID NO: 3656 - protein, 19 aa, Artificial Sequence
  Synthetically generated peptide
  VARIANT (1)...(19): Xaa = Any Amino Acid
PGTCGEXICAYAACXXTGC

SEQ ID NO: 3657 - protein, 20 aa, Artificial Sequence
  Synthetically generated peptide
  VARIANT (1)...(20): Xaa = Any Amino Acid
PGTCGEXICAYAACXXXTGC

SEQ ID NO: 3658 - protein, 20 aa, Artificial Sequence
  Synthetically generated peptide
  VARIANT (1)...(20): Xaa = Any Amino Acid
PGTCGEXICAYAACXXTXGC

SEQ ID NO: 3659 - protein, 20 aa, Artificial Sequence
  Synthetically generated peptide
  VARIANT (1)...(20): Xaa = Any Amino Acid
PGTCGEXICAYAACXXTGXC

SEQ ID NO: 3660 - protein, 20 aa, Artificial Sequence
  Synthetically generated peptide
  VARIANT (1)...(20): Xaa = Any Amino Acid
PGTCGEXICAYAACXXTGCX

SEQ ID NO: 3661 - protein, 19 aa, Artificial Sequence
  Synthetically generated peptide
  VARIANT (1)...(19): Xaa = Any Amino Acid
PGTCGEXICAYAACXTXGC

SEQ ID NO: 3662 - protein, 20 aa, Artificial Sequence
  Synthetically generated peptide
  VARIANT (1)...(20): Xaa = Any Amino Acid
PGTCGEXICAYAACXTXXGC

SEQ ID NO: 3663 - protein, 20 aa, Artificial Sequence
  Synthetically generated peptide
  VARIANT (1)...(20): Xaa = Any Amino Acid
PGTCGEXICAYAACXTXGXC

SEQ ID NO: 3664 - protein, 20 aa, Artificial Sequence
  Synthetically generated peptide
  VARIANT (1)...(20): Xaa = Any Amino Acid
PGTCGEXICAYAACXTXGCX

SEQ ID NO: 3665 - protein, 19 aa, Artificial Sequence
  Synthetically generated peptide
  VARIANT (1)...(19): Xaa = Any Amino Acid
PGTCGEXICAYAACXTGXC

SEQ ID NO: 3666 - protein, 20 aa, Artificial Sequence
  Synthetically generated peptide
  VARIANT (1)...(20): Xaa = Any Amino Acid
PGTCGEXICAYAACXTGXXC

SEQ ID NO: 3667 - protein, 20 aa, Artificial Sequence
  Synthetically generated peptide
  VARIANT (1)...(20): Xaa = Any Amino Acid
PGTCGEXICAYAACXTGXCX

SEQ ID NO: 3668 - protein, 19 aa, Artificial Sequence
  Synthetically generated peptide
  VARIANT (1)...(19): Xaa = Any Amino Acid
PGTCGEXICAYAACXTGCX

SEQ ID NO: 3669 - protein, 20 aa, Artificial Sequence
  Synthetically generated peptide
  VARIANT (1)...(20): Xaa = Any Amino Acid
PGTCGEXICAYAACXTGCXX

SEQ ID NO: 3670 - protein, 18 aa, Artificial Sequence
  Synthetically generated peptide
  VARIANT (1)...(18): Xaa = Any Amino Acid
PGTCGEXICAYAACTXGC

SEQ ID NO: 3671 - protein, 19 aa, Artificial Sequence
  Synthetically generated peptide
  VARIANT (1)...(19): Xaa = Any Amino Acid
PGTCGEXICAYAACTXXGC

SEQ ID NO: 3672 - protein, 20 aa, Artificial Sequence
  Synthetically generated peptide
  VARIANT (1)...(20): Xaa = Any Amino Acid
PGTCGEXICAYAACTXXXGC

SEQ ID NO: 3673 - protein, 20 aa, Artificial Sequence
  Synthetically generated peptide
  VARIANT (1)...(20): Xaa = Any Amino Acid
PGTCGEXICAYAACTXXGXC

SEQ ID NO: 3674 - protein, 20 aa, Artificial Sequence
  Synthetically generated peptide
  VARIANT (1)...(20): Xaa = Any Amino Acid
PGTCGEXICAYAACTXXGCX

SEQ ID NO: 3675 - protein, 19 aa, Artificial Sequence
  Synthetically generated peptide
  VARIANT (1)...(19): Xaa = Any Amino Acid
PGTCGEXICAYAACTXGXC

SEQ ID NO: 3676 - protein, 20 aa, Artificial Sequence
  Synthetically generated peptide
  VARIANT (1)...(20): Xaa = Any Amino Acid
PGTCGEXICAYAACTXGXXC

SEQ ID NO: 3677 - protein, 20 aa, Artificial Sequence
  Synthetically generated peptide
  VARIANT (1)...(20): Xaa = Any Amino Acid
PGTCGEXICAYAACTXGXCX

SEQ ID NO: 3678 - protein, 19 aa, Artificial Sequence
  Synthetically generated peptide
  VARIANT (1)...(19): Xaa = Any Amino Acid
PGTCGEXICAYAACTXGCX

SEQ ID NO: 3679 - protein, 20 aa, Artificial Sequence
  Synthetically generated peptide
  VARIANT (1)...(20): Xaa = Any Amino Acid
PGTCGEXICAYAACTXGCXX

SEQ ID NO: 3680 - protein, 18 aa, Artificial Sequence
  Synthetically generated peptide
  VARIANT (1)...(18): Xaa = Any Amino Acid
PGTCGEXICAYAACTGXC

SEQ ID NO: 3681 - protein, 19 aa, Artificial Sequence
  Synthetically generated peptide
  VARIANT (1)...(19): Xaa = Any Amino Acid
PGTCGEXICAYAACTGXXC

SEQ ID NO: 3682 - protein, 20 aa, Artificial Sequence
  Synthetically generated peptide
  VARIANT (1)...(20): Xaa = Any Amino Acid
PGTCGEXICAYAACTGXXXC

SEQ ID NO: 3683 - protein, 20 aa, Artificial Sequence
  Synthetically generated peptide
  VARIANT (1)...(20): Xaa = Any Amino Acid
PGTCGEXICAYAACTGXXCX

SEQ ID NO: 3684 - protein, 19 aa, Artificial Sequence
  Synthetically generated peptide
  VARIANT (1)...(19): Xaa = Any Amino Acid
PGTCGEXICAYAACTGXCX

SEQ ID NO: 3685 - protein, 20 aa, Artificial Sequence
  Synthetically generated peptide
  VARIANT (1)...(20): Xaa = Any Amino Acid
PGTCGEXICAYAACTGXCXX

SEQ ID NO: 3686 - protein, 18 aa, Artificial Sequence
  Synthetically generated peptide
  VARIANT (1)...(18): Xaa = Any Amino Acid
PGTCGEXICAYAACTGCX

SEQ ID NO: 3687 - protein, 19 aa, Artificial Sequence
  Synthetically generated peptide
  VARIANT (1)...(19): Xaa = Any Amino Acid
PGTCGEXICAYAACTGCXX

SEQ ID NO: 3688 - protein, 20 aa, Artificial Sequence
  Synthetically generated peptide
  VARIANT (1)...(20): Xaa = Any Amino Acid
PGTCGEXICAYAACTGCXXX

SEQ ID NO: 3689 - protein, 17 aa, Artificial Sequence
  Synthetically generated peptide
  VARIANT (1)...(17): Xaa = Any Amino Acid
PGTCGEIXCAYAACTGC

SEQ ID NO: 3690 - protein, 18 aa, Artificial Sequence
  Synthetically generated peptide
  VARIANT (1)...(18): Xaa = Any Amino Acid
PGTCGEIXXCAYAACTGC

SEQ ID NO: 3691 - protein, 19 aa, Artificial Sequence
  Synthetically generated peptide
  VARIANT (1)...(19): Xaa = Any Amino Acid
PGTCGEIXXXCAYAACTGC

SEQ ID NO: 3692 - protein, 20 aa, Artificial Sequence
  Synthetically generated peptide
  VARIANT (1)...(20): Xaa = Any Amino Acid
PGTCGEIXXXXCAYAACTGC

SEQ ID NO: 3693 - protein, 20 aa, Artificial Sequence
  Synthetically generated peptide
  VARIANT (1)...(20): Xaa = Any Amino Acid
PGTCGEIXXXCXAYAACTGC

SEQ ID NO: 3694 - protein, 20 aa, Artificial Sequence
  Synthetically generated peptide
  VARIANT (1)...(20): Xaa = Any Amino Acid
PGTCGEIXXXCAXYAACTGC

SEQ ID NO: 3695 - protein, 20 aa, Artificial Sequence
  Synthetically generated peptide
  VARIANT (1)...(20): Xaa = Any Amino Acid
PGTCGEIXXXCAYXAACTGC

SEQ ID NO: 3696 - protein, 20 aa, Artificial Sequence
  Synthetically generated peptide
  VARIANT (1)...(20): Xaa = Any Amino Acid
PGTCGEIXXXCAYAXACTGC

SEQ ID NO: 3697 - protein, 20 aa, Artificial Sequence
  Synthetically generated peptide
  VARIANT (1)...(20): Xaa = Any Amino Acid
PGTCGEIXXXCAYAAXCTGC

SEQ ID NO: 3698 - protein, 20 aa, Artificial Sequence
  Synthetically generated peptide
  VARIANT (1)...(20): Xaa = Any Amino Acid
PGTCGEIXXXCAYAACXTGC

SEQ ID NO: 3699 - protein, 20 aa, Artificial Sequence
  Synthetically generated peptide
  VARIANT (1)...(20): Xaa = Any Amino Acid
PGTCGEIXXXCAYAACTXGC

SEQ ID NO: 3700 - protein, 20 aa, Artificial Sequence
  Synthetically generated peptide
  VARIANT (1)...(20): Xaa = Any Amino Acid
PGTCGEIXXXCAYAACTGXC

SEQ ID NO: 3701 - protein, 20 aa, Artificial Sequence
  Synthetically generated peptide
  VARIANT (1)...(20): Xaa = Any Amino Acid
PGTCGEIXXXCAYAACTGCX

SEQ ID NO: 3702 - protein, 19 aa, Artificial Sequence
  Synthetically generated peptide
  VARIANT (1)...(19): Xaa = Any Amino Acid
PGTCGEIXXCXAYAACTGC

SEQ ID NO: 3703 - protein, 20 aa, Artificial Sequence
  Synthetically generated peptide
  VARIANT (1)...(20): Xaa = Any Amino Acid
PGTCGEIXXCXXAYAACTGC

SEQ ID NO: 3704 - protein, 20 aa, Artificial Sequence
  Synthetically generated peptide
  VARIANT (1)...(20): Xaa = Any Amino Acid
PGTCGEIXXCXAXYAACTGC

SEQ ID NO: 3705 - protein, 20 aa, Artificial Sequence
  Synthetically generated peptide
  VARIANT (1)...(20): Xaa = Any Amino Acid
PGTCGEIXXCXAYXAACTGC

SEQ ID NO: 3706 - protein, 20 aa, Artificial Sequence
  Synthetically generated peptide
  VARIANT (1)...(20): Xaa = Any Amino Acid
PGTCGEIXXCXAYAXACTGC

SEQ ID NO: 3707 - protein, 20 aa, Artificial Sequence
  Synthetically generated peptide
  VARIANT (1)...(20): Xaa = Any Amino Acid
PGTCGEIXXCXAYAAXCTGC

SEQ ID NO: 3708 - protein, 20 aa, Artificial Sequence
  Synthetically generated peptide
  VARIANT (1)...(20): Xaa = Any Amino Acid
PGTCGEIXXCXAYAACXTGC

SEQ ID NO: 3709 - protein, 20 aa, Artificial Sequence
  Synthetically generated peptide
  VARIANT (1)...(20): Xaa = Any Amino Acid
PGTCGEIXXCXAYAACTXGC

SEQ ID NO: 3710 - protein, 20 aa, Artificial Sequence
  Synthetically generated peptide
  VARIANT (1)...(20): Xaa = Any Amino Acid
PGTCGEIXXCXAYAACTGXC

SEQ ID NO: 3711 - protein, 20 aa, Artificial Sequence
  Synthetically generated peptide
  VARIANT (1)...(20): Xaa = Any Amino Acid
PGTCGEIXXCXAYAACTGCX

SEQ ID NO: 3712 - protein, 19 aa, Artificial Sequence
  Synthetically generated peptide
  VARIANT (1)...(19): Xaa = Any Amino Acid
PGTCGEIXXCAXYAACTGC

SEQ ID NO: 3713 - protein, 20 aa, Artificial Sequence
  Synthetically generated peptide
  VARIANT (1)...(20): Xaa = Any Amino Acid
PGTCGEIXXCAXXYAACTGC

SEQ ID NO: 3714 - protein, 20 aa, Artificial Sequence
  Synthetically generated peptide
  VARIANT (1)...(20): Xaa = Any Amino Acid
PGTCGEIXXCAXYXAACTGC

SEQ ID NO: 3715 - protein, 20 aa, Artificial Sequence
  Synthetically generated peptide
  VARIANT (1)...(20): Xaa = Any Amino Acid
PGTCGEIXXCAXYAXACTGC

SEQ ID NO: 3716 - protein, 20 aa, Artificial Sequence
  Synthetically generated peptide
  VARIANT (1)...(20): Xaa = Any Amino Acid
PGTCGEIXXCAXYAAXCTGC

SEQ ID NO: 3717 - protein, 20 aa, Artificial Sequence
  Synthetically generated peptide
  VARIANT (1)...(20): Xaa = Any Amino Acid
PGTCGEIXXCAXYAACXTGC

SEQ ID NO: 3718 - protein, 20 aa, Artificial Sequence
  Synthetically generated peptide
  VARIANT (1)...(20): Xaa = Any Amino Acid
PGTCGEIXXCAXYAACTXGC

SEQ ID NO: 3719 - protein, 20 aa, Artificial Sequence
  Synthetically generated peptide
  VARIANT (1)...(20): Xaa = Any Amino Acid
PGTCGEIXXCAXYAACTGXC

SEQ ID NO: 3720 - protein, 20 aa, Artificial Sequence
  Synthetically generated peptide
  VARIANT (1)...(20): Xaa = Any Amino Acid
PGTCGEIXXCAXYAACTGCX

SEQ ID NO: 3721 - protein, 19 aa, Artificial Sequence
  Synthetically generated peptide
  VARIANT (1)...(19): Xaa = Any Amino Acid
PGTCGEIXXCAYXAACTGC

SEQ ID NO: 3722 - protein, 20 aa, Artificial Sequence
  Synthetically generated peptide
  VARIANT (1)...(20): Xaa = Any Amino Acid
PGTCGEIXXCAYXXAACTGC

SEQ ID NO: 3723 - protein, 20 aa, Artificial Sequence
  Synthetically generated peptide
  VARIANT (1)...(20): Xaa = Any Amino Acid
PGTCGEIXXCAYXAXACTGC

SEQ ID NO: 3724 - protein, 20 aa, Artificial Sequence
  Synthetically generated peptide
  VARIANT (1)...(20): Xaa = Any Amino Acid
PGTCGEIXXCAYXAAXCTGC

SEQ ID NO: 3725 - protein, 20 aa, Artificial Sequence
  Synthetically generated peptide
  VARIANT (1)...(20): Xaa = Any Amino Acid
PGTCGEIXXCAYXAACXTGC

SEQ ID NO: 3726 - protein, 20 aa, Artificial Sequence
  Synthetically generated peptide
  VARIANT (1)...(20): Xaa = Any Amino Acid
PGTCGEIXXCAYXAACTXGC

SEQ ID NO: 3727 - protein, 20 aa, Artificial Sequence
  Synthetically generated peptide
  VARIANT (1)...(20): Xaa = Any Amino Acid
PGTCGEIXXCAYXAACTGXC

SEQ ID NO: 3728 - protein, 20 aa, Artificial Sequence
  Synthetically generated peptide
  VARIANT (1)...(20): Xaa = Any Amino Acid
PGTCGEIXXCAYXAACTGCX

SEQ ID NO: 3729 - protein, 19 aa, Artificial Sequence
  Synthetically generated peptide
  VARIANT (1)...(19): Xaa = Any Amino Acid
PGTCGEIXXCAYAXACTGC

SEQ ID NO: 3730 - protein, 20 aa, Artificial Sequence
  Synthetically generated peptide
  VARIANT (1)...(20): Xaa = Any Amino Acid
PGTCGEIXXCAYAXXACTGC

SEQ ID NO: 3731 - protein, 20 aa, Artificial Sequence
  Synthetically generated peptide
  VARIANT (1)...(20): Xaa = Any Amino Acid
PGTCGEIXXCAYAXAXCTGC

SEQ ID NO: 3732 - protein, 20 aa, Artificial Sequence
  Synthetically generated peptide
  VARIANT (1)...(20): Xaa = Any Amino Acid
PGTCGEIXXCAYAXACXTGC

SEQ ID NO: 3733 - protein, 20 aa, Artificial Sequence
  Synthetically generated peptide
  VARIANT (1)...(20): Xaa = Any Amino Acid
PGTCGEIXXCAYAXACTXGC

SEQ ID NO: 3734 - protein, 20 aa, Artificial Sequence
  Synthetically generated peptide
  VARIANT (1)...(20): Xaa = Any Amino Acid
PGTCGEIXXCAYAXACTGXC

SEQ ID NO: 3735 - protein, 20 aa, Artificial Sequence
  Synthetically generated peptide
  VARIANT (1)...(20): Xaa = Any Amino Acid
PGTCGEIXXCAYAXACTGCX

SEQ ID NO: 3736 - protein, 19 aa, Artificial Sequence
  Synthetically generated peptide
  VARIANT (1)...(19): Xaa = Any Amino Acid
PGTCGEIXXCAYAAXCTGC

SEQ ID NO: 3737 - protein, 20 aa, Artificial Sequence
  Synthetically generated peptide
  VARIANT (1)...(20): Xaa = Any Amino Acid
PGTCGEIXXCAYAAXXCTGC

SEQ ID NO: 3738 - protein, 20 aa, Artificial Sequence
  Synthetically generated peptide
  VARIANT (1)...(20): Xaa = Any Amino Acid
PGTCGEIXXCAYAAXCXTGC

SEQ ID NO: 3739 - protein, 20 aa, Artificial Sequence
  Synthetically generated peptide
  VARIANT (1)...(20): Xaa = Any Amino Acid
PGTCGEIXXCAYAAXCTXGC

SEQ ID NO: 3740 - protein, 20 aa, Artificial Sequence
  Synthetically generated peptide
  VARIANT (1)...(20): Xaa = Any Amino Acid
PGTCGEIXXCAYAAXCTGXC

SEQ ID NO: 3741 - protein, 20 aa, Artificial Sequence
  Synthetically generated peptide
  VARIANT (1)...(20): Xaa = Any Amino Acid
PGTCGEIXXCAYAAXCTGCX

SEQ ID NO: 3742 - protein, 19 aa, Artificial Sequence
  Synthetically generated peptide
  VARIANT (1)...(19): Xaa = Any Amino Acid
PGTCGEIXXCAYAACXTGC

SEQ ID NO: 3743 - protein, 20 aa, Artificial Sequence
  Synthetically generated peptide
  VARIANT (1)...(20): Xaa = Any Amino Acid
PGTCGEIXXCAYAACXXTGC

SEQ ID NO: 3744 - protein, 20 aa, Artificial Sequence
  Synthetically generated peptide
  VARIANT (1)...(20): Xaa = Any Amino Acid
PGTCGEIXXCAYAACXTXGC

SEQ ID NO: 3745 - protein, 20 aa, Artificial Sequence
  Synthetically generated peptide
  VARIANT (1)...(20): Xaa = Any Amino Acid
PGTCGEIXXCAYAACXTGXC

SEQ ID NO: 3746 - protein, 20 aa, Artificial Sequence
  Synthetically generated peptide
  VARIANT (1)...(20): Xaa = Any Amino Acid
PGTCGEIXXCAYAACXTGCX

SEQ ID NO: 3747 - protein, 19 aa, Artificial Sequence
  Synthetically generated peptide
  VARIANT (1)...(19): Xaa = Any Amino Acid
PGTCGEIXXCAYAACTXGC

SEQ ID NO: 3748 - protein, 20 aa, Artificial Sequence
  Synthetically generated peptide
  VARIANT (1)...(20): Xaa = Any Amino Acid
PGTCGEIXXCAYAACTXXGC

SEQ ID NO: 3749 - protein, 20 aa, Artificial Sequence
  Synthetically generated peptide
  VARIANT (1)...(20): Xaa = Any Amino Acid
PGTCGEIXXCAYAACTXGXC

SEQ ID NO: 3750 - protein, 20 aa, Artificial Sequence
  Synthetically generated peptide
  VARIANT (1)...(20): Xaa = Any Amino Acid
PGTCGEIXXCAYAACTXGCX

SEQ ID NO: 3751 - protein, 19 aa, Artificial Sequence
  Synthetically generated peptide
  VARIANT (1)...(19): Xaa = Any Amino Acid
PGTCGEIXXCAYAACTGXC

SEQ ID NO: 3752 - protein, 20 aa, Artificial Sequence
  Synthetically generated peptide
  VARIANT (1)...(20): Xaa = Any Amino Acid
PGTCGEIXXCAYAACTGXXC

SEQ ID NO: 3753 - protein, 20 aa, Artificial Sequence
  Synthetically generated peptide
  VARIANT (1)...(20): Xaa = Any Amino Acid
PGTCGEIXXCAYAACTGXCX

SEQ ID NO: 3754 - protein, 19 aa, Artificial Sequence
  Synthetically generated peptide
  VARIANT (1)...(19): Xaa = Any Amino Acid
PGTCGEIXXCAYAACTGCX

SEQ ID NO: 3755 - protein, 20 aa, Artificial Sequence
  Synthetically generated peptide
  VARIANT (1)...(20): Xaa = Any Amino Acid
PGTCGEIXXCAYAACTGCXX

SEQ ID NO: 3756 - protein, 18 aa, Artificial Sequence
  Synthetically generated peptide
  VARIANT (1)...(18): Xaa = Any Amino Acid
PGTCGEIXCXAYAACTGC

SEQ ID NO: 3757 - protein, 19 aa, Artificial Sequence
  Synthetically generated peptide
  VARIANT (1)...(19): Xaa = Any Amino Acid
PGTCGEIXCXXAYAACTGC

SEQ ID NO: 3758 - protein, 20 aa, Artificial Sequence
  Synthetically generated peptide
  VARIANT (1)...(20): Xaa = Any Amino Acid
PGTCGEIXCXXXAYAACTGC

SEQ ID NO: 3759 - protein, 20 aa, Artificial Sequence
  Synthetically generated peptide
  VARIANT (1)...(20): Xaa = Any Amino Acid
PGTCGEIXCXXAXYAACTGC

SEQ ID NO: 3760 - protein, 20 aa, Artificial Sequence
  Synthetically generated peptide
  VARIANT (1)...(20): Xaa = Any Amino Acid
PGTCGEIXCXXAYXAACTGC

SEQ ID NO: 3761 - protein, 20 aa, Artificial Sequence
  Synthetically generated peptide
  VARIANT (1)...(20): Xaa = Any Amino Acid
PGTCGEIXCXXAYAXACTGC

SEQ ID NO: 3762 - protein, 20 aa, Artificial Sequence
  Synthetically generated peptide
  VARIANT (1)...(20): Xaa = Any Amino Acid
PGTCGEIXCXXAYAAXCTGC

SEQ ID NO: 3763 - protein, 20 aa, Artificial Sequence
  Synthetically generated peptide
  VARIANT (1)...(20): Xaa = Any Amino Acid
PGTCGEIXCXXAYAACXTGC

SEQ ID NO: 3764 - protein, 20 aa, Artificial Sequence
  Synthetically generated peptide
  VARIANT (1)...(20): Xaa = Any Amino Acid
PGTCGEIXCXXAYAACTXGC

SEQ ID NO: 3765 - protein, 20 aa, Artificial Sequence
  Synthetically generated peptide
  VARIANT (1)...(20): Xaa = Any Amino Acid
PGTCGEIXCXXAYAACTGXC

SEQ ID NO: 3766 - protein, 20 aa, Artificial Sequence
  Synthetically generated peptide
  VARIANT (1)...(20): Xaa = Any Amino Acid
PGTCGEIXCXXAYAACTGCX

SEQ ID NO: 3767 - protein, 19 aa, Artificial Sequence
  Synthetically generated peptide
  VARIANT (1)...(19): Xaa = Any Amino Acid
PGTCGEIXCXAXYAACTGC

SEQ ID NO: 3768 - protein, 20 aa, Artificial Sequence
  Synthetically generated peptide
  VARIANT (1)...(20): Xaa = Any Amino Acid
PGTCGEIXCXAXXYAACTGC

SEQ ID NO: 3769 - protein, 20 aa, Artificial Sequence
  Synthetically generated peptide
  VARIANT (1)...(20): Xaa = Any Amino Acid
PGTCGEIXCXAXYXAACTGC

SEQ ID NO: 3770 - protein, 20 aa, Artificial Sequence
  Synthetically generated peptide
  VARIANT (1)...(20): Xaa = Any Amino Acid
PGTCGEIXCXAXYAXACTGC

SEQ ID NO: 3771 - protein, 20 aa, Artificial Sequence
  Synthetically generated peptide
  VARIANT (1)...(20): Xaa = Any Amino Acid
PGTCGEIXCXAXYAAXCTGC

SEQ ID NO: 3772 - protein, 20 aa, Artificial Sequence
  Synthetically generated peptide
  VARIANT (1)...(20): Xaa = Any Amino Acid
PGTCGEIXCXAXYAACXTGC

SEQ ID NO: 3773 - protein, 20 aa, Artificial Sequence
  Synthetically generated peptide
  VARIANT (1)...(20): Xaa = Any Amino Acid
PGTCGEIXCXAXYAACTXGC

SEQ ID NO: 3774 - protein, 20 aa, Artificial Sequence
  Synthetically generated peptide
  VARIANT (1)...(20): Xaa = Any Amino Acid
PGTCGEIXCXAXYAACTGXC

SEQ ID NO: 3775 - protein, 20 aa, Artificial Sequence
  Synthetically generated peptide
  VARIANT (1)...(20): Xaa = Any Amino Acid
PGTCGEIXCXAXYAACTGCX

SEQ ID NO: 3776 - protein, 19 aa, Artificial Sequence
  Synthetically generated peptide
  VARIANT (1)...(19): Xaa = Any Amino Acid
PGTCGEIXCXAYXAACTGC

SEQ ID NO: 3777 - protein, 20 aa, Artificial Sequence
  Synthetically generated peptide
  VARIANT (1)...(20): Xaa = Any Amino Acid
PGTCGEIXCXAYXXAACTGC

SEQ ID NO: 3778 - protein, 20 aa, Artificial Sequence
  Synthetically generated peptide
  VARIANT (1)...(20): Xaa = Any Amino Acid
PGTCGEIXCXAYXAXACTGC

SEQ ID NO: 3779 - protein, 20 aa, Artificial Sequence
  Synthetically generated peptide
  VARIANT (1)...(20): Xaa = Any Amino Acid
PGTCGEIXCXAYXAAXCTGC

SEQ ID NO: 3780 - protein, 20 aa, Artificial Sequence
  Synthetically generated peptide
  VARIANT (1)...(20): Xaa = Any Amino Acid
PGTCGEIXCXAYXAACXTGC

SEQ ID NO: 3781 - protein, 20 aa, Artificial Sequence
  Synthetically generated peptide
  VARIANT (1)...(20): Xaa = Any Amino Acid
PGTCGEIXCXAYXAACTXGC

SEQ ID NO: 3782 - protein, 20 aa, Artificial Sequence
  Synthetically generated peptide
  VARIANT (1)...(20): Xaa = Any Amino Acid
PGTCGEIXCXAYXAACTGXC

SEQ ID NO: 3783 - protein, 20 aa, Artificial Sequence
  Synthetically generated peptide
  VARIANT (1)...(20): Xaa = Any Amino Acid
PGTCGEIXCXAYXAACTGCX

SEQ ID NO: 3784 - protein, 19 aa, Artificial Sequence
  Synthetically generated peptide
  VARIANT (1)...(19): Xaa = Any Amino Acid
PGTCGEIXCXAYAXACTGC

SEQ ID NO: 3785 - protein, 20 aa, Artificial Sequence
  Synthetically generated peptide
  VARIANT (1)...(20): Xaa = Any Amino Acid
PGTCGEIXCXAYAXXACTGC

SEQ ID NO: 3786 - protein, 20 aa, Artificial Sequence
  Synthetically generated peptide
  VARIANT (1)...(20): Xaa = Any Amino Acid
PGTCGEIXCXAYAXAXCTGC

SEQ ID NO: 3787 - protein, 20 aa, Artificial Sequence
  Synthetically generated peptide
  VARIANT (1)...(20): Xaa = Any Amino Acid
PGTCGEIXCXAYAXACXTGC

SEQ ID NO: 3788 - protein, 20 aa, Artificial Sequence
  Synthetically generated peptide
  VARIANT (1)...(20): Xaa = Any Amino Acid
PGTCGEIXCXAYAXACTXGC

SEQ ID NO: 3789 - protein, 20 aa, Artificial Sequence
  Synthetically generated peptide
  VARIANT (1)...(20): Xaa = Any Amino Acid
PGTCGEIXCXAYAXACTGXC

SEQ ID NO: 3790 - protein, 20 aa, Artificial Sequence
  Synthetically generated peptide
  VARIANT (1)...(20): Xaa = Any Amino Acid
PGTCGEIXCXAYAXACTGCX

SEQ ID NO: 3791 - protein, 19 aa, Artificial Sequence
  Synthetically generated peptide
  VARIANT (1)...(19): Xaa = Any Amino Acid
PGTCGEIXCXAYAAXCTGC

SEQ ID NO: 3792 - protein, 20 aa, Artificial Sequence
  Synthetically generated peptide
  VARIANT (1)...(20): Xaa = Any Amino Acid
PGTCGEIXCXAYAAXXCTGC

SEQ ID NO: 3793 - protein, 20 aa, Artificial Sequence
  Synthetically generated peptide
  VARIANT (1)...(20): Xaa = Any Amino Acid
PGTCGEIXCXAYAAXCXTGC

SEQ ID NO: 3794 - protein, 20 aa, Artificial Sequence
  Synthetically generated peptide
  VARIANT (1)...(20): Xaa = Any Amino Acid
PGTCGEIXCXAYAAXCTXGC

SEQ ID NO: 3795 - protein, 20 aa, Artificial Sequence
  Synthetically generated peptide
  VARIANT (1)...(20): Xaa = Any Amino Acid
PGTCGEIXCXAYAAXCTGXC

SEQ ID NO: 3796 - protein, 20 aa, Artificial Sequence
  Synthetically generated peptide
  VARIANT (1)...(20): Xaa = Any Amino Acid
PGTCGEIXCXAYAAXCTGCX

SEQ ID NO: 3797 - protein, 19 aa, Artificial Sequence
  Synthetically generated peptide
  VARIANT (1)...(19): Xaa = Any Amino Acid
PGTCGEIXCXAYAACXTGC

SEQ ID NO: 3798 - protein, 20 aa, Artificial Sequence
  Synthetically generated peptide
  VARIANT (1)...(20): Xaa = Any Amino Acid
PGTCGEIXCXAYAACXXTGC

SEQ ID NO: 3799 - protein, 20 aa, Artificial Sequence
  Synthetically generated peptide
  VARIANT (1)...(20): Xaa = Any Amino Acid
PGTCGEIXCXAYAACXTXGC

SEQ ID NO: 3800 - protein, 20 aa, Artificial Sequence
  Synthetically generated peptide
  VARIANT (1)...(20): Xaa = Any Amino Acid
PGTCGEIXCXAYAACXTGXC

SEQ ID NO: 3801 - protein, 20 aa, Artificial Sequence
  Synthetically generated peptide
  VARIANT (1)...(20): Xaa = Any Amino Acid
PGTCGEIXCXAYAACXTGCX

SEQ ID NO: 3802 - protein, 19 aa, Artificial Sequence
  Synthetically generated peptide
  VARIANT (1)...(19): Xaa = Any Amino Acid
PGTCGEIXCXAYAACTXGC

SEQ ID NO: 3803 - protein, 20 aa, Artificial Sequence
  Synthetically generated peptide
  VARIANT (1)...(20): Xaa = Any Amino Acid
PGTCGEIXCXAYAACTXXGC

SEQ ID NO: 3804 - protein, 20 aa, Artificial Sequence
  Synthetically generated peptide
  VARIANT (1)...(20): Xaa = Any Amino Acid
PGTCGEIXCXAYAACTXGXC

SEQ ID NO: 3805 - protein, 20 aa, Artificial Sequence
  Synthetically generated peptide
  VARIANT (1)...(20): Xaa = Any Amino Acid
PGTCGEIXCXAYAACTXGCX

SEQ ID NO: 3806 - protein, 19 aa, Artificial Sequence
  Synthetically generated peptide
  VARIANT (1)...(19): Xaa = Any Amino Acid
PGTCGEIXCXAYAACTGXC

SEQ ID NO: 3807 - protein, 20 aa, Artificial Sequence
  Synthetically generated peptide
  VARIANT (1)...(20): Xaa = Any Amino Acid
PGTCGEIXCXAYAACTGXXC

SEQ ID NO: 3808 - protein, 20 aa, Artificial Sequence
  Synthetically generated peptide
  VARIANT (1)...(20): Xaa = Any Amino Acid
PGTCGEIXCXAYAACTGXCX

SEQ ID NO: 3809 - protein, 19 aa, Artificial Sequence
  Synthetically generated peptide
  VARIANT (1)...(19): Xaa = Any Amino Acid
PGTCGEIXCXAYAACTGCX

SEQ ID NO: 3810 - protein, 20 aa, Artificial Sequence
  Synthetically generated peptide
  VARIANT (1)...(20): Xaa = Any Amino Acid
PGTCGEIXCXAYAACTGCXX

SEQ ID NO: 3811 - protein, 18 aa, Artificial Sequence
  Synthetically generated peptide
  VARIANT (1)...(18): Xaa = Any Amino Acid
PGTCGEIXCAXYAACTGC

SEQ ID NO: 3812 - protein, 19 aa, Artificial Sequence
  Synthetically generated peptide
  VARIANT (1)...(19): Xaa = Any Amino Acid
PGTCGEIXCAXXYAACTGC

SEQ ID NO: 3813 - protein, 20 aa, Artificial Sequence
  Synthetically generated peptide
  VARIANT (1)...(20): Xaa = Any Amino Acid
PGTCGEIXCAXXXYAACTGC

SEQ ID NO: 3814 - protein, 20 aa, Artificial Sequence
  Synthetically generated peptide
  VARIANT (1)...(20): Xaa = Any Amino Acid
PGTCGEIXCAXXYXAACTGC

SEQ ID NO: 3815 - protein, 20 aa, Artificial Sequence
  Synthetically generated peptide
  VARIANT (1)...(20): Xaa = Any Amino Acid
PGTCGEIXCAXXYAXACTGC

SEQ ID NO: 3816 - protein, 20 aa, Artificial Sequence
  Synthetically generated peptide
  VARIANT (1)...(20): Xaa = Any Amino Acid
PGTCGEIXCAXXYAAXCTGC

SEQ ID NO: 3817 - protein, 20 aa, Artificial Sequence
  Synthetically generated peptide
  VARIANT (1)...(20): Xaa = Any Amino Acid
PGTCGEIXCAXXYAACXTGC

SEQ ID NO: 3818 - protein, 20 aa, Artificial Sequence
  Synthetically generated peptide
  VARIANT (1)...(20): Xaa = Any Amino Acid
PGTCGEIXCAXXYAACTXGC

SEQ ID NO: 3819 - protein, 20 aa, Artificial Sequence
  Synthetically generated peptide
  VARIANT (1)...(20): Xaa = Any Amino Acid
PGTCGEIXCAXXYAACTGXC

SEQ ID NO: 3820 - protein, 20 aa, Artificial Sequence
  Synthetically generated peptide
  VARIANT (1)...(20): Xaa = Any Amino Acid
PGTCGEIXCAXXYAACTGCX

SEQ ID NO: 3821 - protein, 19 aa, Artificial Sequence
  Synthetically generated peptide
  VARIANT (1)...(19): Xaa = Any Amino Acid
PGTCGEIXCAXYXAACTGC

SEQ ID NO: 3822 - protein, 20 aa, Artificial Sequence
  Synthetically generated peptide
  VARIANT (1)...(20): Xaa = Any Amino Acid
PGTCGEIXCAXYXXAACTGC

SEQ ID NO: 3823 - protein, 20 aa, Artificial Sequence
  Synthetically generated peptide
  VARIANT (1)...(20): Xaa = Any Amino Acid
PGTCGEIXCAXYXAXACTGC

SEQ ID NO: 3824 - protein, 20 aa, Artificial Sequence
  Synthetically generated peptide
  VARIANT (1)...(20): Xaa = Any Amino Acid
PGTCGEIXCAXYXAAXCTGC

SEQ ID NO: 3825 - protein, 20 aa, Artificial Sequence
  Synthetically generated peptide
  VARIANT (1)...(20): Xaa = Any Amino Acid
PGTCGEIXCAXYXAACXTGC

SEQ ID NO: 3826 - protein, 20 aa, Artificial Sequence
  Synthetically generated peptide
  VARIANT (1)...(20): Xaa = Any Amino Acid
PGTCGEIXCAXYXAACTXGC

SEQ ID NO: 3827 - protein, 20 aa, Artificial Sequence
  Synthetically generated peptide
  VARIANT (1)...(20): Xaa = Any Amino Acid
PGTCGEIXCAXYXAACTGXC

SEQ ID NO: 3828 - protein, 20 aa, Artificial Sequence
  Synthetically generated peptide
  VARIANT (1)...(20): Xaa = Any Amino Acid
PGTCGEIXCAXYXAACTGCX

SEQ ID NO: 3829 - protein, 19 aa, Artificial Sequence
  Synthetically generated peptide
  VARIANT (1)...(19): Xaa = Any Amino Acid
PGTCGEIXCAXYAXACTGC

SEQ ID NO: 3830 - protein, 20 aa, Artificial Sequence
  Synthetically generated peptide
  VARIANT (1)...(20): Xaa = Any Amino Acid
PGTCGEIXCAXYAXXACTGC

SEQ ID NO: 3831 - protein, 20 aa, Artificial Sequence
  Synthetically generated peptide
  VARIANT (1)...(20): Xaa = Any Amino Acid
PGTCGEIXCAXYAXAXCTGC

SEQ ID NO: 3832 - protein, 20 aa, Artificial Sequence
  Synthetically generated peptide
  VARIANT (1)...(20): Xaa = Any Amino Acid
PGTCGEIXCAXYAXACXTGC

SEQ ID NO: 3833 - protein, 20 aa, Artificial Sequence
  Synthetically generated peptide
  VARIANT (1)...(20): Xaa = Any Amino Acid
PGTCGEIXCAXYAXACTXGC

SEQ ID NO: 3834 - protein, 20 aa, Artificial Sequence
  Synthetically generated peptide
  VARIANT (1)...(20): Xaa = Any Amino Acid
PGTCGEIXCAXYAXACTGXC

SEQ ID NO: 3835 - protein, 20 aa, Artificial Sequence
  Synthetically generated peptide
  VARIANT (1)...(20): Xaa = Any Amino Acid
PGTCGEIXCAXYAXACTGCX

SEQ ID NO: 3836 - protein, 19 aa, Artificial Sequence
  Synthetically generated peptide
  VARIANT (1)...(19): Xaa = Any Amino Acid
PGTCGEIXCAXYAAXCTGC

SEQ ID NO: 3837 - protein, 20 aa, Artificial Sequence
  Synthetically generated peptide
  VARIANT (1)...(20): Xaa = Any Amino Acid
PGTCGEIXCAXYAAXXCTGC

SEQ ID NO: 3838 - protein, 20 aa, Artificial Sequence
  Synthetically generated peptide
  VARIANT (1)...(20): Xaa = Any Amino Acid
PGTCGEIXCAXYAAXCXTGC

SEQ ID NO: 3839 - protein, 20 aa, Artificial Sequence
  Synthetically generated peptide
  VARIANT (1)...(20): Xaa = Any Amino Acid
PGTCGEIXCAXYAAXCTXGC

SEQ ID NO: 3840 - protein, 20 aa, Artificial Sequence
  Synthetically generated peptide
  VARIANT (1)...(20): Xaa = Any Amino Acid
PGTCGEIXCAXYAAXCTGXC

SEQ ID NO: 3841 - protein, 20 aa, Artificial Sequence
  Synthetically generated peptide
  VARIANT (1)...(20): Xaa = Any Amino Acid
PGTCGEIXCAXYAAXCTGCX

SEQ ID NO: 3842 - protein, 19 aa, Artificial Sequence
  Synthetically generated peptide
  VARIANT (1)...(19): Xaa = Any Amino Acid
PGTCGEIXCAXYAACXTGC

SEQ ID NO: 3843 - protein, 20 aa, Artificial Sequence
  Synthetically generated peptide
  VARIANT (1)...(20): Xaa = Any Amino Acid
PGTCGEIXCAXYAACXXTGC

SEQ ID NO: 3844 - protein, 20 aa, Artificial Sequence
  Synthetically generated peptide
  VARIANT (1)...(20): Xaa = Any Amino Acid
PGTCGEIXCAXYAACXTXGC

SEQ ID NO: 3845 - protein, 20 aa, Artificial Sequence
  Synthetically generated peptide
  VARIANT (1)...(20): Xaa = Any Amino Acid
PGTCGEIXCAXYAACXTGXC

SEQ ID NO: 3846 - protein, 20 aa, Artificial Sequence
  Synthetically generated peptide
  VARIANT (1)...(20): Xaa = Any Amino Acid
PGTCGEIXCAXYAACXTGCX

SEQ ID NO: 3847 - protein, 19 aa, Artificial Sequence
  Synthetically generated peptide
  VARIANT (1)...(19): Xaa = Any Amino Acid
PGTCGEIXCAXYAACTXGC

SEQ ID NO: 3848 - protein, 20 aa, Artificial Sequence
  Synthetically generated peptide
  VARIANT (1)...(20): Xaa = Any Amino Acid
PGTCGEIXCAXYAACTXXGC

SEQ ID NO: 3849 - protein, 20 aa, Artificial Sequence
  Synthetically generated peptide
  VARIANT (1)...(20): Xaa = Any Amino Acid
PGTCGEIXCAXYAACTXGXC

SEQ ID NO: 3850 - protein, 20 aa, Artificial Sequence
  Synthetically generated peptide
  VARIANT (1)...(20): Xaa = Any Amino Acid
PGTCGEIXCAXYAACTXGCX

SEQ ID NO: 3851 - protein, 19 aa, Artificial Sequence
  Synthetically generated peptide
  VARIANT (1)...(19): Xaa = Any Amino Acid
PGTCGEIXCAXYAACTGXC

SEQ ID NO: 3852 - protein, 20 aa, Artificial Sequence
  Synthetically generated peptide
  VARIANT (1)...(20): Xaa = Any Amino Acid
PGTCGEIXCAXYAACTGXXC

SEQ ID NO: 3853 - protein, 20 aa, Artificial Sequence
  Synthetically generated peptide
  VARIANT (1)...(20): Xaa = Any Amino Acid
PGTCGEIXCAXYAACTGXCX

SEQ ID NO: 3854 - protein, 19 aa, Artificial Sequence
  Synthetically generated peptide
  VARIANT (1)...(19): Xaa = Any Amino Acid
PGTCGEIXCAXYAACTGCX

SEQ ID NO: 3855 - protein, 20 aa, Artificial Sequence
  Synthetically generated peptide
  VARIANT (1)...(20): Xaa = Any Amino Acid
PGTCGEIXCAXYAACTGCXX

SEQ ID NO: 3856 - protein, 18 aa, Artificial Sequence
  Synthetically generated peptide
  VARIANT (1)...(18): Xaa = Any Amino Acid
PGTCGEIXCAYXAACTGC

SEQ ID NO: 3857 - protein, 19 aa, Artificial Sequence
  Synthetically generated peptide
  VARIANT (1)...(19): Xaa = Any Amino Acid
PGTCGEIXCAYXXAACTGC

SEQ ID NO: 3858 - protein, 20 aa, Artificial Sequence
  Synthetically generated peptide
  VARIANT (1)...(20): Xaa = Any Amino Acid
PGTCGEIXCAYXXXAACTGC

SEQ ID NO: 3859 - protein, 20 aa, Artificial Sequence
  Synthetically generated peptide
  VARIANT (1)...(20): Xaa = Any Amino Acid
PGTCGEIXCAYXXAXACTGC

SEQ ID NO: 3860 - protein, 20 aa, Artificial Sequence
  Synthetically generated peptide
  VARIANT (1)...(20): Xaa = Any Amino Acid
PGTCGEIXCAYXXAAXCTGC

SEQ ID NO: 3861 - protein, 20 aa, Artificial Sequence
  Synthetically generated peptide
  VARIANT (1)...(20): Xaa = Any Amino Acid
PGTCGEIXCAYXXAACXTGC

SEQ ID NO: 3862 - protein, 20 aa, Artificial Sequence
  Synthetically generated peptide
  VARIANT (1)...(20): Xaa = Any Amino Acid
PGTCGEIXCAYXXAACTXGC

SEQ ID NO: 3863 - protein, 20 aa, Artificial Sequence
  Synthetically generated peptide
  VARIANT (1)...(20): Xaa = Any Amino Acid
PGTCGEIXCAYXXAACTGXC

SEQ ID NO: 3864 - protein, 20 aa, Artificial Sequence
  Synthetically generated peptide
  VARIANT (1)...(20): Xaa = Any Amino Acid
PGTCGEIXCAYXXAACTGCX

SEQ ID NO: 3865 - protein, 19 aa, Artificial Sequence
  Synthetically generated peptide
  VARIANT (1)...(19): Xaa = Any Amino Acid
PGTCGEIXCAYXAXACTGC

SEQ ID NO: 3866 - protein, 20 aa, Artificial Sequence
  Synthetically generated peptide
  VARIANT (1)...(20): Xaa = Any Amino Acid
PGTCGEIXCAYXAXXACTGC

SEQ ID NO: 3867 - protein, 20 aa, Artificial Sequence
  Synthetically generated peptide
  VARIANT (1)...(20): Xaa = Any Amino Acid
PGTCGEIXCAYXAXAXCTGC

SEQ ID NO: 3868 - protein, 20 aa, Artificial Sequence
  Synthetically generated peptide
  VARIANT (1)...(20): Xaa = Any Amino Acid
PGTCGEIXCAYXAXACXTGC

SEQ ID NO: 3869 - protein, 20 aa, Artificial Sequence
  Synthetically generated peptide
  VARIANT (1)...(20): Xaa = Any Amino Acid
PGTCGEIXCAYXAXACTXGC

SEQ ID NO: 3870 - protein, 20 aa, Artificial Sequence
  Synthetically generated peptide
  VARIANT (1)...(20): Xaa = Any Amino Acid
PGTCGEIXCAYXAXACTGXC

SEQ ID NO: 3871 - protein, 20 aa, Artificial Sequence
  Synthetically generated peptide
  VARIANT (1)...(20): Xaa = Any Amino Acid
PGTCGEIXCAYXAXACTGCX

SEQ ID NO: 3872 - protein, 19 aa, Artificial Sequence
  Synthetically generated peptide
  VARIANT (1)...(19): Xaa = Any Amino Acid
PGTCGEIXCAYXAAXCTGC

SEQ ID NO: 3873 - protein, 20 aa, Artificial Sequence
  Synthetically generated peptide
  VARIANT (1)...(20): Xaa = Any Amino Acid
PGTCGEIXCAYXAAXXCTGC

SEQ ID NO: 3874 - protein, 20 aa, Artificial Sequence
  Synthetically generated peptide
  VARIANT (1)...(20): Xaa = Any Amino Acid
PGTCGEIXCAYXAAXCXTGC

SEQ ID NO: 3875 - protein, 20 aa, Artificial Sequence
  Synthetically generated peptide
  VARIANT (1)...(20): Xaa = Any Amino Acid
PGTCGEIXCAYXAAXCTXGC

SEQ ID NO: 3876 - protein, 20 aa, Artificial Sequence
  Synthetically generated peptide
  VARIANT (1)...(20): Xaa = Any Amino Acid
PGTCGEIXCAYXAAXCTGXC

SEQ ID NO: 3877 - protein, 20 aa, Artificial Sequence
  Synthetically generated peptide
  VARIANT (1)...(20): Xaa = Any Amino Acid
PGTCGEIXCAYXAAXCTGCX

SEQ ID NO: 3878 - protein, 19 aa, Artificial Sequence
  Synthetically generated peptide
  VARIANT (1)...(19): Xaa = Any Amino Acid
PGTCGEIXCAYXAACXTGC

SEQ ID NO: 3879 - protein, 20 aa, Artificial Sequence
  Synthetically generated peptide
  VARIANT (1)...(20): Xaa = Any Amino Acid
PGTCGEIXCAYXAACXXTGC

SEQ ID NO: 3880 - protein, 20 aa, Artificial Sequence
  Synthetically generated peptide
  VARIANT (1)...(20): Xaa = Any Amino Acid
PGTCGEIXCAYXAACXTXGC

SEQ ID NO: 3881 - protein, 20 aa, Artificial Sequence
  Synthetically generated peptide
  VARIANT (1)...(20): Xaa = Any Amino Acid
PGTCGEIXCAYXAACXTGXC

SEQ ID NO: 3882 - protein, 20 aa, Artificial Sequence
  Synthetically generated peptide
  VARIANT (1)...(20): Xaa = Any Amino Acid
PGTCGEIXCAYXAACXTGCX

SEQ ID NO: 3883 - protein, 19 aa, Artificial Sequence
  Synthetically generated peptide
  VARIANT (1)...(19): Xaa = Any Amino Acid
PGTCGEIXCAYXAACTXGC

SEQ ID NO: 3884 - protein, 20 aa, Artificial Sequence
  Synthetically generated peptide
  VARIANT (1)...(20): Xaa = Any Amino Acid
PGTCGEIXCAYXAACTXXGC

SEQ ID NO: 3885 - protein, 20 aa, Artificial Sequence
  Synthetically generated peptide
  VARIANT (1)...(20): Xaa = Any Amino Acid
PGTCGEIXCAYXAACTXGXC

SEQ ID NO: 3886 - protein, 20 aa, Artificial Sequence
  Synthetically generated peptide
  VARIANT (1)...(20): Xaa = Any Amino Acid
PGTCGEIXCAYXAACTXGCX

SEQ ID NO: 3887 - protein, 19 aa, Artificial Sequence
  Synthetically generated peptide
  VARIANT (1)...(19): Xaa = Any Amino Acid
PGTCGEIXCAYXAACTGXC

SEQ ID NO: 3888 - protein, 20 aa, Artificial Sequence
  Synthetically generated peptide
  VARIANT (1)...(20): Xaa = Any Amino Acid
PGTCGEIXCAYXAACTGXXC

SEQ ID NO: 3889 - protein, 20 aa, Artificial Sequence
  Synthetically generated peptide
  VARIANT (1)...(20): Xaa = Any Amino Acid
PGTCGEIXCAYXAACTGXCX

SEQ ID NO: 3890 - protein, 19 aa, Artificial Sequence
  Synthetically generated peptide
  VARIANT (1)...(19): Xaa = Any Amino Acid
PGTCGEIXCAYXAACTGCX

SEQ ID NO: 3891 - protein, 20 aa, Artificial Sequence
  Synthetically generated peptide
  VARIANT (1)...(20): Xaa = Any Amino Acid
PGTCGEIXCAYXAACTGCXX

SEQ ID NO: 3892 - protein, 18 aa, Artificial Sequence
  Synthetically generated peptide
  VARIANT (1)...(18): Xaa = Any Amino Acid
PGTCGEIXCAYAXACTGC

SEQ ID NO: 3893 - protein, 19 aa, Artificial Sequence
  Synthetically generated peptide
  VARIANT (1)...(19): Xaa = Any Amino Acid
PGTCGEIXCAYAXXACTGC

SEQ ID NO: 3894 - protein, 20 aa, Artificial Sequence
  Synthetically generated peptide
  VARIANT (1)...(20): Xaa = Any Amino Acid
PGTCGEIXCAYAXXXACTGC

SEQ ID NO: 3895 - protein, 20 aa, Artificial Sequence
  Synthetically generated peptide
  VARIANT (1)...(20): Xaa = Any Amino Acid
PGTCGEIXCAYAXXAXCTGC

SEQ ID NO: 3896 - protein, 20 aa, Artificial Sequence
  Synthetically generated peptide
  VARIANT (1)...(20): Xaa = Any Amino Acid
PGTCGEIXCAYAXXACXTGC

SEQ ID NO: 3897 - protein, 20 aa, Artificial Sequence
  Synthetically generated peptide
  VARIANT (1)...(20): Xaa = Any Amino Acid
PGTCGEIXCAYAXXACTXGC

SEQ ID NO: 3898 - protein, 20 aa, Artificial Sequence
  Synthetically generated peptide
  VARIANT (1)...(20): Xaa = Any Amino Acid
PGTCGEIXCAYAXXACTGXC

SEQ ID NO: 3899 - protein, 20 aa, Artificial Sequence
  Synthetically generated peptide
  VARIANT (1)...(20): Xaa = Any Amino Acid
PGTCGEIXCAYAXXACTGCX

SEQ ID NO: 3900 - protein, 19 aa, Artificial Sequence
  Synthetically generated peptide
  VARIANT (1)...(19): Xaa = Any Amino Acid
PGTCGEIXCAYAXAXCTGC

SEQ ID NO: 3901 - protein, 20 aa, Artificial Sequence
  Synthetically generated peptide
  VARIANT (1)...(20): Xaa = Any Amino Acid
PGTCGEIXCAYAXAXXCTGC

SEQ ID NO: 3902 - protein, 20 aa, Artificial Sequence
  Synthetically generated peptide
  VARIANT (1)...(20): Xaa = Any Amino Acid
PGTCGEIXCAYAXAXCXTGC

SEQ ID NO: 3903 - protein, 20 aa, Artificial Sequence
  Synthetically generated peptide
  VARIANT (1)...(20): Xaa = Any Amino Acid
PGTCGEIXCAYAXAXCTXGC

SEQ ID NO: 3904 - protein, 20 aa, Artificial Sequence
  Synthetically generated peptide
  VARIANT (1)...(20): Xaa = Any Amino Acid
PGTCGEIXCAYAXAXCTGXC

SEQ ID NO: 3905 - protein, 20 aa, Artificial Sequence
  Synthetically generated peptide
  VARIANT (1)...(20): Xaa = Any Amino Acid
PGTCGEIXCAYAXAXCTGCX

SEQ ID NO: 3906 - protein, 19 aa, Artificial Sequence
  Synthetically generated peptide
  VARIANT (1)...(19): Xaa = Any Amino Acid
PGTCGEIXCAYAXACXTGC

SEQ ID NO: 3907 - protein, 20 aa, Artificial Sequence
  Synthetically generated peptide
  VARIANT (1)...(20): Xaa = Any Amino Acid
PGTCGEIXCAYAXACXXTGC

SEQ ID NO: 3908 - protein, 20 aa, Artificial Sequence
  Synthetically generated peptide
  VARIANT (1)...(20): Xaa = Any Amino Acid
PGTCGEIXCAYAXACXTXGC

SEQ ID NO: 3909 - protein, 20 aa, Artificial Sequence
  Synthetically generated peptide
  VARIANT (1)...(20): Xaa = Any Amino Acid
PGTCGEIXCAYAXACXTGXC

SEQ ID NO: 3910 - protein, 20 aa, Artificial Sequence
  Synthetically generated peptide
  VARIANT (1)...(20): Xaa = Any Amino Acid
PGTCGEIXCAYAXACXTGCX

SEQ ID NO: 3911 - protein, 19 aa, Artificial Sequence
  Synthetically generated peptide
  VARIANT (1)...(19): Xaa = Any Amino Acid
PGTCGEIXCAYAXACTXGC

SEQ ID NO: 3912 - protein, 20 aa, Artificial Sequence
  Synthetically generated peptide
  VARIANT (1)...(20): Xaa = Any Amino Acid
PGTCGEIXCAYAXACTXXGC

SEQ ID NO: 3913 - protein, 20 aa, Artificial Sequence
  Synthetically generated peptide
  VARIANT (1)...(20): Xaa = Any Amino Acid
PGTCGEIXCAYAXACTXGXC

SEQ ID NO: 3914 - protein, 20 aa, Artificial Sequence
  Synthetically generated peptide
  VARIANT (1)...(20): Xaa = Any Amino Acid
PGTCGEIXCAYAXACTXGCX

SEQ ID NO: 3915 - protein, 19 aa, Artificial Sequence
  Synthetically generated peptide
  VARIANT (1)...(19): Xaa = Any Amino Acid
PGTCGEIXCAYAXACTGXC

SEQ ID NO: 3916 - protein, 20 aa, Artificial Sequence
  Synthetically generated peptide
  VARIANT (1)...(20): Xaa = Any Amino Acid
PGTCGEIXCAYAXACTGXXC

SEQ ID NO: 3917 - protein, 20 aa, Artificial Sequence
  Synthetically generated peptide
  VARIANT (1)...(20): Xaa = Any Amino Acid
PGTCGEIXCAYAXACTGXCX

SEQ ID NO: 3918 - protein, 19 aa, Artificial Sequence
  Synthetically generated peptide
  VARIANT (1)...(19): Xaa = Any Amino Acid
PGTCGEIXCAYAXACTGCX

SEQ ID NO: 3919 - protein, 20 aa, Artificial Sequence
  Synthetically generated peptide
  VARIANT (1)...(20): Xaa = Any Amino Acid
PGTCGEIXCAYAXACTGCXX

SEQ ID NO: 3920 - protein, 18 aa, Artificial Sequence
  Synthetically generated peptide
  VARIANT (1)...(18): Xaa = Any Amino Acid
PGTCGEIXCAYAAXCTGC

SEQ ID NO: 3921 - protein, 19 aa, Artificial Sequence
  Synthetically generated peptide
  VARIANT (1)...(19): Xaa = Any Amino Acid
PGTCGEIXCAYAAXXCTGC

SEQ ID NO: 3922 - protein, 20 aa, Artificial Sequence
  Synthetically generated peptide
  VARIANT (1)...(20): Xaa = Any Amino Acid
PGTCGEIXCAYAAXXXCTGC

SEQ ID NO: 3923 - protein, 20 aa, Artificial Sequence
  Synthetically generated peptide
  VARIANT (1)...(20): Xaa = Any Amino Acid
PGTCGEIXCAYAAXXCXTGC

SEQ ID NO: 3924 - protein, 20 aa, Artificial Sequence
  Synthetically generated peptide
  VARIANT (1)...(20): Xaa = Any Amino Acid
PGTCGEIXCAYAAXXCTXGC

SEQ ID NO: 3925 - protein, 20 aa, Artificial Sequence
  Synthetically generated peptide
  VARIANT (1)...(20): Xaa = Any Amino Acid
PGTCGEIXCAYAAXXCTGXC

SEQ ID NO: 3926 - protein, 20 aa, Artificial Sequence
  Synthetically generated peptide
  VARIANT (1)...(20): Xaa = Any Amino Acid
PGTCGEIXCAYAAXXCTGCX

SEQ ID NO: 3927 - protein, 19 aa, Artificial Sequence
  Synthetically generated peptide
  VARIANT (1)...(19): Xaa = Any Amino Acid
PGTCGEIXCAYAAXCXTGC

SEQ ID NO: 3928 - protein, 20 aa, Artificial Sequence
  Synthetically generated peptide
  VARIANT (1)...(20): Xaa = Any Amino Acid
PGTCGEIXCAYAAXCXXTGC

SEQ ID NO: 3929 - protein, 20 aa, Artificial Sequence
  Synthetically generated peptide
  VARIANT (1)...(20): Xaa = Any Amino Acid
PGTCGEIXCAYAAXCXTXGC

SEQ ID NO: 3930 - protein, 20 aa, Artificial Sequence
  Synthetically generated peptide
  VARIANT (1)...(20): Xaa = Any Amino Acid
PGTCGEIXCAYAAXCXTGXC

SEQ ID NO: 3931 - protein, 20 aa, Artificial Sequence
  Synthetically generated peptide
  VARIANT (1)...(20): Xaa = Any Amino Acid
PGTCGEIXCAYAAXCXTGCX

SEQ ID NO: 3932 - protein, 19 aa, Artificial Sequence
  Synthetically generated peptide
  VARIANT (1)...(19): Xaa = Any Amino Acid
PGTCGEIXCAYAAXCTXGC

SEQ ID NO: 3933 - protein, 20 aa, Artificial Sequence
  Synthetically generated peptide
  VARIANT (1)...(20): Xaa = Any Amino Acid
PGTCGEIXCAYAAXCTXXGC

SEQ ID NO: 3934 - protein, 20 aa, Artificial Sequence
  Synthetically generated peptide
  VARIANT (1)...(20): Xaa = Any Amino Acid
PGTCGEIXCAYAAXCTXGXC

SEQ ID NO: 3935 - protein, 20 aa, Artificial Sequence
  Synthetically generated peptide
  VARIANT (1)...(20): Xaa = Any Amino Acid
PGTCGEIXCAYAAXCTXGCX

SEQ ID NO: 3936 - protein, 19 aa, Artificial Sequence
  Synthetically generated peptide
  VARIANT (1)...(19): Xaa = Any Amino Acid
PGTCGEIXCAYAAXCTGXC

SEQ ID NO: 3937 - protein, 20 aa, Artificial Sequence
  Synthetically generated peptide
  VARIANT (1)...(20): Xaa = Any Amino Acid
PGTCGEIXCAYAAXCTGXXC

SEQ ID NO: 3938 - protein, 20 aa, Artificial Sequence
  Synthetically generated peptide
  VARIANT (1)...(20): Xaa = Any Amino Acid
PGTCGEIXCAYAAXCTGXCX

SEQ ID NO: 3939 - protein, 19 aa, Artificial Sequence
  Synthetically generated peptide
  VARIANT (1)...(19): Xaa = Any Amino Acid
PGTCGEIXCAYAAXCTGCX

SEQ ID NO: 3940 - protein, 20 aa, Artificial Sequence
  Synthetically generated peptide
  VARIANT (1)...(20): Xaa = Any Amino Acid
PGTCGEIXCAYAAXCTGCXX

SEQ ID NO: 3941 - protein, 18 aa, Artificial Sequence
  Synthetically generated peptide
  VARIANT (1)...(18): Xaa = Any Amino Acid
PGTCGEIXCAYAACXTGC

SEQ ID NO: 3942 - protein, 19 aa, Artificial Sequence
  Synthetically generated peptide
  VARIANT (1)...(19): Xaa = Any Amino Acid
PGTCGEIXCAYAACXXTGC

SEQ ID NO: 3943 - protein, 20 aa, Artificial Sequence
  Synthetically generated peptide
  VARIANT (1)...(20): Xaa = Any Amino Acid
PGTCGEIXCAYAACXXXTGC

SEQ ID NO: 3944 - protein, 20 aa, Artificial Sequence
  Synthetically generated peptide
  VARIANT (1)...(20): Xaa = Any Amino Acid
PGTCGEIXCAYAACXXTXGC

SEQ ID NO: 3945 - protein, 20 aa, Artificial Sequence
  Synthetically generated peptide
  VARIANT (1)...(20): Xaa = Any Amino Acid
PGTCGEIXCAYAACXXTGXC

SEQ ID NO: 3946 - protein, 20 aa, Artificial Sequence
  Synthetically generated peptide
  VARIANT (1)...(20): Xaa = Any Amino Acid
PGTCGEIXCAYAACXXTGCX

SEQ ID NO: 3947 - protein, 19 aa, Artificial Sequence
  Synthetically generated peptide
  VARIANT (1)...(19): Xaa = Any Amino Acid
PGTCGEIXCAYAACXTXGC

SEQ ID NO: 3948 - protein, 20 aa, Artificial Sequence
  Synthetically generated peptide
  VARIANT (1)...(20): Xaa = Any Amino Acid
PGTCGEIXCAYAACXTXXGC

SEQ ID NO: 3949 - protein, 20 aa, Artificial Sequence
  Synthetically generated peptide
  VARIANT (1)...(20): Xaa = Any Amino Acid
PGTCGEIXCAYAACXTXGXC

SEQ ID NO: 3950 - protein, 20 aa, Artificial Sequence
  Synthetically generated peptide
  VARIANT (1)...(20): Xaa = Any Amino Acid
PGTCGEIXCAYAACXTXGCX

SEQ ID NO: 3951 - protein, 19 aa, Artificial Sequence
  Synthetically generated peptide
  VARIANT (1)...(19): Xaa = Any Amino Acid
PGTCGEIXCAYAACXTGXC

SEQ ID NO: 3952 - protein, 20 aa, Artificial Sequence
  Synthetically generated peptide
  VARIANT (1)...(20): Xaa = Any Amino Acid
PGTCGEIXCAYAACXTGXXC

SEQ ID NO: 3953 - protein, 20 aa, Artificial Sequence
  Synthetically generated peptide
  VARIANT (1)...(20): Xaa = Any Amino Acid
PGTCGEIXCAYAACXTGXCX

SEQ ID NO: 3954 - protein, 19 aa, Artificial Sequence
  Synthetically generated peptide
  VARIANT (1)...(19): Xaa = Any Amino Acid
PGTCGEIXCAYAACXTGCX

SEQ ID NO: 3955 - protein, 20 aa, Artificial Sequence
  Synthetically generated peptide
  VARIANT (1)...(20): Xaa = Any Amino Acid
PGTCGEIXCAYAACXTGCXX

SEQ ID NO: 3956 - protein, 18 aa, Artificial Sequence
  Synthetically generated peptide
  VARIANT (1)...(18): Xaa = Any Amino Acid
PGTCGEIXCAYAACTXGC

SEQ ID NO: 3957 - protein, 19 aa, Artificial Sequence
  Synthetically generated peptide
  VARIANT (1)...(19): Xaa = Any Amino Acid
PGTCGEIXCAYAACTXXGC

SEQ ID NO: 3958 - protein, 20 aa, Artificial Sequence
  Synthetically generated peptide
  VARIANT (1)...(20): Xaa = Any Amino Acid
PGTCGEIXCAYAACTXXXGC

SEQ ID NO: 3959 - protein, 20 aa, Artificial Sequence
  Synthetically generated peptide
  VARIANT (1)...(20): Xaa = Any Amino Acid
PGTCGEIXCAYAACTXXGXC

SEQ ID NO: 3960 - protein, 20 aa, Artificial Sequence
  Synthetically generated peptide
  VARIANT (1)...(20): Xaa = Any Amino Acid
PGTCGEIXCAYAACTXXGCX

SEQ ID NO: 3961 - protein, 19 aa, Artificial Sequence
  Synthetically generated peptide
  VARIANT (1)...(19): Xaa = Any Amino Acid
PGTCGEIXCAYAACTXGXC

SEQ ID NO: 3962 - protein, 20 aa, Artificial Sequence
  Synthetically generated peptide
  VARIANT (1)...(20): Xaa = Any Amino Acid
PGTCGEIXCAYAACTXGXXC

SEQ ID NO: 3963 - protein, 20 aa, Artificial Sequence
  Synthetically generated peptide
  VARIANT (1)...(20): Xaa = Any Amino Acid
PGTCGEIXCAYAACTXGXCX

SEQ ID NO: 3964 - protein, 19 aa, Artificial Sequence
  Synthetically generated peptide
  VARIANT (1)...(19): Xaa = Any Amino Acid
PGTCGEIXCAYAACTXGCX

SEQ ID NO: 3965 - protein, 20 aa, Artificial Sequence
  Synthetically generated peptide
  VARIANT (1)...(20): Xaa = Any Amino Acid
PGTCGEIXCAYAACTXGCXX

SEQ ID NO: 3966 - protein, 18 aa, Artificial Sequence
  Synthetically generated peptide
  VARIANT (1)...(18): Xaa = Any Amino Acid
PGTCGEIXCAYAACTGXC

SEQ ID NO: 3967 - protein, 19 aa, Artificial Sequence
  Synthetically generated peptide
  VARIANT (1)...(19): Xaa = Any Amino Acid
PGTCGEIXCAYAACTGXXC

SEQ ID NO: 3968 - protein, 20 aa, Artificial Sequence
  Synthetically generated peptide
  VARIANT (1)...(20): Xaa = Any Amino Acid
PGTCGEIXCAYAACTGXXXC

SEQ ID NO: 3969 - protein, 20 aa, Artificial Sequence
  Synthetically generated peptide
  VARIANT (1)...(20): Xaa = Any Amino Acid
PGTCGEIXCAYAACTGXXCX

SEQ ID NO: 3970 - protein, 19 aa, Artificial Sequence
  Synthetically generated peptide
  VARIANT (1)...(19): Xaa = Any Amino Acid
PGTCGEIXCAYAACTGXCX

SEQ ID NO: 3971 - protein, 20 aa, Artificial Sequence
  Synthetically generated peptide
  VARIANT (1)...(20): Xaa = Any Amino Acid
PGTCGEIXCAYAACTGXCXX

SEQ ID NO: 3972 - protein, 18 aa, Artificial Sequence
  Synthetically generated peptide
  VARIANT (1)...(18): Xaa = Any Amino Acid
PGTCGEIXCAYAACTGCX

SEQ ID NO: 3973 - protein, 19 aa, Artificial Sequence
  Synthetically generated peptide
  VARIANT (1)...(19): Xaa = Any Amino Acid
PGTCGEIXCAYAACTGCXX

SEQ ID NO: 3974 - protein, 20 aa, Artificial Sequence
  Synthetically generated peptide
  VARIANT (1)...(20): Xaa = Any Amino Acid
PGTCGEIXCAYAACTGCXXX

SEQ ID NO: 3975 - protein, 17 aa, Artificial Sequence
  Synthetically generated peptide
  VARIANT (1)...(17): Xaa = Any Amino Acid
PGTCGEICXAYAACTGC

SEQ ID NO: 3976 - protein, 18 aa, Artificial Sequence
  Synthetically generated peptide
  VARIANT (1)...(18): Xaa = Any Amino Acid
PGTCGEICXXAYAACTGC

SEQ ID NO: 3977 - protein, 19 aa, Artificial Sequence
  Synthetically generated peptide
  VARIANT (1)...(19): Xaa = Any Amino Acid
PGTCGEICXXXAYAACTGC

SEQ ID NO: 3978 - protein, 20 aa, Artificial Sequence
  Synthetically generated peptide
  VARIANT (1)...(20): Xaa = Any Amino Acid
PGTCGEICXXXXAYAACTGC

SEQ ID NO: 3979 - protein, 20 aa, Artificial Sequence
  Synthetically generated peptide
  VARIANT (1)...(20): Xaa = Any Amino Acid
PGTCGEICXXXAXYAACTGC

SEQ ID NO: 3980 - protein, 20 aa, Artificial Sequence
  Synthetically generated peptide
  VARIANT (1)...(20): Xaa = Any Amino Acid
PGTCGEICXXXAYXAACTGC

SEQ ID NO: 3981 - protein, 20 aa, Artificial Sequence
  Synthetically generated peptide
  VARIANT (1)...(20): Xaa = Any Amino Acid
PGTCGEICXXXAYAXACTGC

SEQ ID NO: 3982 - protein, 20 aa, Artificial Sequence
  Synthetically generated peptide
  VARIANT (1)...(20): Xaa = Any Amino Acid
PGTCGEICXXXAYAAXCTGC

SEQ ID NO: 3983 - protein, 20 aa, Artificial Sequence
  Synthetically generated peptide
  VARIANT (1)...(20): Xaa = Any Amino Acid
PGTCGEICXXXAYAACXTGC

SEQ ID NO: 3984 - protein, 20 aa, Artificial Sequence
  Synthetically generated peptide
  VARIANT (1)...(20): Xaa = Any Amino Acid
PGTCGEICXXXAYAACTXGC

SEQ ID NO: 3985 - protein, 20 aa, Artificial Sequence
  Synthetically generated peptide
  VARIANT (1)...(20): Xaa = Any Amino Acid
PGTCGEICXXXAYAACTGXC

SEQ ID NO: 3986 - protein, 20 aa, Artificial Sequence
  Synthetically generated peptide
  VARIANT (1)...(20): Xaa = Any Amino Acid
PGTCGEICXXXAYAACTGCX

SEQ ID NO: 3987 - protein, 19 aa, Artificial Sequence
  Synthetically generated peptide
  VARIANT (1)...(19): Xaa = Any Amino Acid
PGTCGEICXXAXYAACTGC

SEQ ID NO: 3988 - protein, 20 aa, Artificial Sequence
  Synthetically generated peptide
  VARIANT (1)...(20): Xaa = Any Amino Acid
PGTCGEICXXAXXYAACTGC

SEQ ID NO: 3989 - protein, 20 aa, Artificial Sequence
  Synthetically generated peptide
  VARIANT (1)...(20): Xaa = Any Amino Acid
PGTCGEICXXAXYXAACTGC

SEQ ID NO: 3990 - protein, 20 aa, Artificial Sequence
  Synthetically generated peptide
  VARIANT (1)...(20): Xaa = Any Amino Acid
PGTCGEICXXAXYAXACTGC

SEQ ID NO: 3991 - protein, 20 aa, Artificial Sequence
  Synthetically generated peptide
  VARIANT (1)...(20): Xaa = Any Amino Acid
PGTCGEICXXAXYAAXCTGC

SEQ ID NO: 3992 - protein, 20 aa, Artificial Sequence
  Synthetically generated peptide
  VARIANT (1)...(20): Xaa = Any Amino Acid
PGTCGEICXXAXYAACXTGC

SEQ ID NO: 3993 - protein, 20 aa, Artificial Sequence
  Synthetically generated peptide
  VARIANT (1)...(20): Xaa = Any Amino Acid
PGTCGEICXXAXYAACTXGC

SEQ ID NO: 3994 - protein, 20 aa, Artificial Sequence
  Synthetically generated peptide
  VARIANT (1)...(20): Xaa = Any Amino Acid
PGTCGEICXXAXYAACTGXC

SEQ ID NO: 3995 - protein, 20 aa, Artificial Sequence
  Synthetically generated peptide
  VARIANT (1)...(20): Xaa = Any Amino Acid
PGTCGEICXXAXYAACTGCX

SEQ ID NO: 3996 - protein, 19 aa, Artificial Sequence
  Synthetically generated peptide
  VARIANT (1)...(19): Xaa = Any Amino Acid
PGTCGEICXXAYXAACTGC

SEQ ID NO: 3997 - protein, 20 aa, Artificial Sequence
  Synthetically generated peptide
  VARIANT (1)...(20): Xaa = Any Amino Acid
PGTCGEICXXAYXXAACTGC

SEQ ID NO: 3998 - protein, 20 aa, Artificial Sequence
  Synthetically generated peptide
  VARIANT (1)...(20): Xaa = Any Amino Acid
PGTCGEICXXAYXAXACTGC

SEQ ID NO: 3999 - protein, 20 aa, Artificial Sequence
  Synthetically generated peptide
  VARIANT (1)...(20): Xaa = Any Amino Acid
PGTCGEICXXAYXAAXCTGC

SEQ ID NO: 4000 - protein, 20 aa, Artificial Sequence
  Synthetically generated peptide
  VARIANT (1)...(20): Xaa = Any Amino Acid
PGTCGEICXXAYXAACXTGC

SEQ ID NO: 4001 - protein, 20 aa, Artificial Sequence
  Synthetically generated peptide
  VARIANT (1)...(20): Xaa = Any Amino Acid
PGTCGEICXXAYXAACTXGC

SEQ ID NO: 4002 - protein, 20 aa, Artificial Sequence
  Synthetically generated peptide
  VARIANT (1)...(20): Xaa = Any Amino Acid
PGTCGEICXXAYXAACTGXC

SEQ ID NO: 4003 - protein, 20 aa, Artificial Sequence
  Synthetically generated peptide
  VARIANT (1)...(20): Xaa = Any Amino Acid
PGTCGEICXXAYXAACTGCX

SEQ ID NO: 4004 - protein, 19 aa, Artificial Sequence
  Synthetically generated peptide
  VARIANT (1)...(19): Xaa = Any Amino Acid
PGTCGEICXXAYAXACTGC

SEQ ID NO: 4005 - protein, 20 aa, Artificial Sequence
  Synthetically generated peptide
  VARIANT (1)...(20): Xaa = Any Amino Acid
PGTCGEICXXAYAXXACTGC

SEQ ID NO: 4006 - protein, 20 aa, Artificial Sequence
  Synthetically generated peptide
  VARIANT (1)...(20): Xaa = Any Amino Acid
PGTCGEICXXAYAXAXCTGC

SEQ ID NO: 4007 - protein, 20 aa, Artificial Sequence
  Synthetically generated peptide
  VARIANT (1)...(20): Xaa = Any Amino Acid
PGTCGEICXXAYAXACXTGC

SEQ ID NO: 4008 - protein, 20 aa, Artificial Sequence
  Synthetically generated peptide
  VARIANT (1)...(20): Xaa = Any Amino Acid
PGTCGEICXXAYAXACTXGC

SEQ ID NO: 4009 - protein, 20 aa, Artificial Sequence
  Synthetically generated peptide
  VARIANT (1)...(20): Xaa = Any Amino Acid
PGTCGEICXXAYAXACTGXC

SEQ ID NO: 4010 - protein, 20 aa, Artificial Sequence
  Synthetically generated peptide
  VARIANT (1)...(20): Xaa = Any Amino Acid
PGTCGEICXXAYAXACTGCX

SEQ ID NO: 4011 - protein, 19 aa, Artificial Sequence
  Synthetically generated peptide
  VARIANT (1)...(19): Xaa = Any Amino Acid
PGTCGEICXXAYAAXCTGC

SEQ ID NO: 4012 - protein, 20 aa, Artificial Sequence
  Synthetically generated peptide
  VARIANT (1)...(20): Xaa = Any Amino Acid
PGTCGEICXXAYAAXXCTGC

SEQ ID NO: 4013 - protein, 20 aa, Artificial Sequence
  Synthetically generated peptide
  VARIANT (1)...(20): Xaa = Any Amino Acid
PGTCGEICXXAYAAXCXTGC

SEQ ID NO: 4014 - protein, 20 aa, Artificial Sequence
  Synthetically generated peptide
  VARIANT (1)...(20): Xaa = Any Amino Acid
PGTCGEICXXAYAAXCTXGC

SEQ ID NO: 4015 - protein, 20 aa, Artificial Sequence
  Synthetically generated peptide
  VARIANT (1)...(20): Xaa = Any Amino Acid
PGTCGEICXXAYAAXCTGXC

SEQ ID NO: 4016 - protein, 20 aa, Artificial Sequence
  Synthetically generated peptide
  VARIANT (1)...(20): Xaa = Any Amino Acid
PGTCGEICXXAYAAXCTGCX

SEQ ID NO: 4017 - protein, 19 aa, Artificial Sequence
  Synthetically generated peptide
  VARIANT (1)...(19): Xaa = Any Amino Acid
PGTCGEICXXAYAACXTGC

SEQ ID NO: 4018 - protein, 20 aa, Artificial Sequence
  Synthetically generated peptide
  VARIANT (1)...(20): Xaa = Any Amino Acid
PGTCGEICXXAYAACXXTGC

SEQ ID NO: 4019 - protein, 20 aa, Artificial Sequence
  Synthetically generated peptide
  VARIANT (1)...(20): Xaa = Any Amino Acid
PGTCGEICXXAYAACXTXGC

SEQ ID NO: 4020 - protein, 20 aa, Artificial Sequence
  Synthetically generated peptide
  VARIANT (1)...(20): Xaa = Any Amino Acid
PGTCGEICXXAYAACXTGXC

SEQ ID NO: 4021 - protein, 20 aa, Artificial Sequence
  Synthetically generated peptide
  VARIANT (1)...(20): Xaa = Any Amino Acid
PGTCGEICXXAYAACXTGCX

SEQ ID NO: 4022 - protein, 19 aa, Artificial Sequence
  Synthetically generated peptide
  VARIANT (1)...(19): Xaa = Any Amino Acid
PGTCGEICXXAYAACTXGC

SEQ ID NO: 4023 - protein, 20 aa, Artificial Sequence
  Synthetically generated peptide
  VARIANT (1)...(20): Xaa = Any Amino Acid
PGTCGEICXXAYAACTXXGC

SEQ ID NO: 4024 - protein, 20 aa, Artificial Sequence
  Synthetically generated peptide
  VARIANT (1)...(20): Xaa = Any Amino Acid
PGTCGEICXXAYAACTXGXC

SEQ ID NO: 4025 - protein, 20 aa, Artificial Sequence
  Synthetically generated peptide
  VARIANT (1)...(20): Xaa = Any Amino Acid
PGTCGEICXXAYAACTXGCX

SEQ ID NO: 4026 - protein, 19 aa, Artificial Sequence
  Synthetically generated peptide
  VARIANT (1)...(19): Xaa = Any Amino Acid
PGTCGEICXXAYAACTGXC

SEQ ID NO: 4027 - protein, 20 aa, Artificial Sequence
  Synthetically generated peptide
  VARIANT (1)...(20): Xaa = Any Amino Acid
PGTCGEICXXAYAACTGXXC

SEQ ID NO: 4028 - protein, 20 aa, Artificial Sequence
  Synthetically generated peptide
  VARIANT (1)...(20): Xaa = Any Amino Acid
PGTCGEICXXAYAACTGXCX

SEQ ID NO: 4029 - protein, 19 aa, Artificial Sequence
  Synthetically generated peptide
  VARIANT (1)...(19): Xaa = Any Amino Acid
PGTCGEICXXAYAACTGCX

SEQ ID NO: 4030 - protein, 20 aa, Artificial Sequence
  Synthetically generated peptide
  VARIANT (1)...(20): Xaa = Any Amino Acid
PGTCGEICXXAYAACTGCXX

SEQ ID NO: 4031 - protein, 18 aa, Artificial Sequence
  Synthetically generated peptide
  VARIANT (1)...(18): Xaa = Any Amino Acid
PGTCGEICXAXYAACTGC

SEQ ID NO: 4032 - protein, 19 aa, Artificial Sequence
  Synthetically generated peptide
  VARIANT (1)...(19): Xaa = Any Amino Acid
PGTCGEICXAXXYAACTGC

SEQ ID NO: 4033 - protein, 20 aa, Artificial Sequence
  Synthetically generated peptide
  VARIANT (1)...(20): Xaa = Any Amino Acid
PGTCGEICXAXXXYAACTGC

SEQ ID NO: 4034 - protein, 20 aa, Artificial Sequence
  Synthetically generated peptide
  VARIANT (1)...(20): Xaa = Any Amino Acid
PGTCGEICXAXXYXAACTGC

SEQ ID NO: 4035 - protein, 20 aa, Artificial Sequence
  Synthetically generated peptide
  VARIANT (1)...(20): Xaa = Any Amino Acid
PGTCGEICXAXXYAXACTGC

SEQ ID NO: 4036 - protein, 20 aa, Artificial Sequence
  Synthetically generated peptide
  VARIANT (1)...(20): Xaa = Any Amino Acid
PGTCGEICXAXXYAAXCTGC

SEQ ID NO: 4037 - protein, 20 aa, Artificial Sequence
  Synthetically generated peptide
  VARIANT (1)...(20): Xaa = Any Amino Acid
PGTCGEICXAXXYAACXTGC

SEQ ID NO: 4038 - protein, 20 aa, Artificial Sequence
  Synthetically generated peptide
  VARIANT (1)...(20): Xaa = Any Amino Acid
PGTCGEICXAXXYAACTXGC

SEQ ID NO: 4039 - protein, 20 aa, Artificial Sequence
  Synthetically generated peptide
  VARIANT (1)...(20): Xaa = Any Amino Acid
PGTCGEICXAXXYAACTGXC

SEQ ID NO: 4040 - protein, 20 aa, Artificial Sequence
  Synthetically generated peptide
  VARIANT (1)...(20): Xaa = Any Amino Acid
PGTCGEICXAXXYAACTGCX

SEQ ID NO: 4041 - protein, 19 aa, Artificial Sequence
  Synthetically generated peptide
  VARIANT (1)...(19): Xaa = Any Amino Acid
PGTCGEICXAXYXAACTGC

SEQ ID NO: 4042 - protein, 20 aa, Artificial Sequence
  Synthetically generated peptide
  VARIANT (1)...(20): Xaa = Any Amino Acid
PGTCGEICXAXYXXAACTGC

SEQ ID NO: 4043 - protein, 20 aa, Artificial Sequence
  Synthetically generated peptide
  VARIANT (1)...(20): Xaa = Any Amino Acid
PGTCGEICXAXYXAXACTGC

SEQ ID NO: 4044 - protein, 20 aa, Artificial Sequence
  Synthetically generated peptide
  VARIANT (1)...(20): Xaa = Any Amino Acid
PGTCGEICXAXYXAAXCTGC

SEQ ID NO: 4045 - protein, 20 aa, Artificial Sequence
  Synthetically generated peptide
  VARIANT (1)...(20): Xaa = Any Amino Acid
PGTCGEICXAXYXAACXTGC

SEQ ID NO: 4046 - protein, 20 aa, Artificial Sequence
  Synthetically generated peptide
  VARIANT (1)...(20): Xaa = Any Amino Acid
PGTCGEICXAXYXAACTXGC

SEQ ID NO: 4047 - protein, 20 aa, Artificial Sequence
  Synthetically generated peptide
  VARIANT (1)...(20): Xaa = Any Amino Acid
PGTCGEICXAXYXAACTGXC

SEQ ID NO: 4048 - protein, 20 aa, Artificial Sequence
  Synthetically generated peptide
  VARIANT (1)...(20): Xaa = Any Amino Acid
PGTCGEICXAXYXAACTGCX

SEQ ID NO: 4049 - protein, 19 aa, Artificial Sequence
  Synthetically generated peptide
  VARIANT (1)...(19): Xaa = Any Amino Acid
PGTCGEICXAXYAXACTGC

SEQ ID NO: 4050 - protein, 20 aa, Artificial Sequence
  Synthetically generated peptide
  VARIANT (1)...(20): Xaa = Any Amino Acid
PGTCGEICXAXYAXXACTGC

SEQ ID NO: 4051 - protein, 20 aa, Artificial Sequence
  Synthetically generated peptide
  VARIANT (1)...(20): Xaa = Any Amino Acid
PGTCGEICXAXYAXAXCTGC

SEQ ID NO: 4052 - protein, 20 aa, Artificial Sequence
  Synthetically generated peptide
  VARIANT (1)...(20): Xaa = Any Amino Acid
PGTCGEICXAXYAXACXTGC

SEQ ID NO: 4053 - protein, 20 aa, Artificial Sequence
  Synthetically generated peptide
  VARIANT (1)...(20): Xaa = Any Amino Acid
PGTCGEICXAXYAXACTXGC

SEQ ID NO: 4054 - protein, 20 aa, Artificial Sequence
  Synthetically generated peptide
  VARIANT (1)...(20): Xaa = Any Amino Acid
PGTCGEICXAXYAXACTGXC

SEQ ID NO: 4055 - protein, 20 aa, Artificial Sequence
  Synthetically generated peptide
  VARIANT (1)...(20): Xaa = Any Amino Acid
PGTCGEICXAXYAXACTGCX

SEQ ID NO: 4056 - protein, 19 aa, Artificial Sequence
  Synthetically generated peptide
  VARIANT (1)...(19): Xaa = Any Amino Acid
PGTCGEICXAXYAAXCTGC

SEQ ID NO: 4057 - protein, 20 aa, Artificial Sequence
  Synthetically generated peptide
  VARIANT (1)...(20): Xaa = Any Amino Acid
PGTCGEICXAXYAAXXCTGC

SEQ ID NO: 4058 - protein, 20 aa, Artificial Sequence
  Synthetically generated peptide
  VARIANT (1)...(20): Xaa = Any Amino Acid
PGTCGEICXAXYAAXCXTGC

SEQ ID NO: 4059 - protein, 20 aa, Artificial Sequence
  Synthetically generated peptide
  VARIANT (1)...(20): Xaa = Any Amino Acid
PGTCGEICXAXYAAXCTXGC

SEQ ID NO: 4060 - protein, 20 aa, Artificial Sequence
  Synthetically generated peptide
  VARIANT (1)...(20): Xaa = Any Amino Acid
PGTCGEICXAXYAAXCTGXC

SEQ ID NO: 4061 - protein, 20 aa, Artificial Sequence
  Synthetically generated peptide
  VARIANT (1)...(20): Xaa = Any Amino Acid
PGTCGEICXAXYAAXCTGCX

SEQ ID NO: 4062 - protein, 19 aa, Artificial Sequence
  Synthetically generated peptide
  VARIANT (1)...(19): Xaa = Any Amino Acid
PGTCGEICXAXYAACXTGC

SEQ ID NO: 4063 - protein, 20 aa, Artificial Sequence
  Synthetically generated peptide
  VARIANT (1)...(20): Xaa = Any Amino Acid
PGTCGEICXAXYAACXXTGC

SEQ ID NO: 4064 - protein, 20 aa, Artificial Sequence
  Synthetically generated peptide
  VARIANT (1)...(20): Xaa = Any Amino Acid
PGTCGEICXAXYAACXTXGC

SEQ ID NO: 4065 - protein, 20 aa, Artificial Sequence
  Synthetically generated peptide
  VARIANT (1)...(20): Xaa = Any Amino Acid
PGTCGEICXAXYAACXTGXC

SEQ ID NO: 4066 - protein, 20 aa, Artificial Sequence
  Synthetically generated peptide
  VARIANT (1)...(20): Xaa = Any Amino Acid
PGTCGEICXAXYAACXTGCX

SEQ ID NO: 4067 - protein, 19 aa, Artificial Sequence
  Synthetically generated peptide
  VARIANT (1)...(19): Xaa = Any Amino Acid
PGTCGEICXAXYAACTXGC

SEQ ID NO: 4068 - protein, 20 aa, Artificial Sequence
  Synthetically generated peptide
  VARIANT (1)...(20): Xaa = Any Amino Acid
PGTCGEICXAXYAACTXXGC

SEQ ID NO: 4069 - protein, 20 aa, Artificial Sequence
  Synthetically generated peptide
  VARIANT (1)...(20): Xaa = Any Amino Acid
PGTCGEICXAXYAACTXGXC

SEQ ID NO: 4070 - protein, 20 aa, Artificial Sequence
  Synthetically generated peptide
  VARIANT (1)...(20): Xaa = Any Amino Acid
PGTCGEICXAXYAACTXGCX

SEQ ID NO: 4071 - protein, 19 aa, Artificial Sequence
  Synthetically generated peptide
  VARIANT (1)...(19): Xaa = Any Amino Acid
PGTCGEICXAXYAACTGXC

SEQ ID NO: 4072 - protein, 20 aa, Artificial Sequence
  Synthetically generated peptide
  VARIANT (1)...(20): Xaa = Any Amino Acid
PGTCGEICXAXYAACTGXXC

SEQ ID NO: 4073 - protein, 20 aa, Artificial Sequence
  Synthetically generated peptide
  VARIANT (1)...(20): Xaa = Any Amino Acid
PGTCGEICXAXYAACTGXCX

SEQ ID NO: 4074 - protein, 19 aa, Artificial Sequence
  Synthetically generated peptide
  VARIANT (1)...(19): Xaa = Any Amino Acid
PGTCGEICXAXYAACTGCX

SEQ ID NO: 4075 - protein, 20 aa, Artificial Sequence
  Synthetically generated peptide
  VARIANT (1)...(20): Xaa = Any Amino Acid
PGTCGEICXAXYAACTGCXX

SEQ ID NO: 4076 - protein, 18 aa, Artificial Sequence
  Synthetically generated peptide
  VARIANT (1)...(18): Xaa = Any Amino Acid
PGTCGEICXAYXAACTGC

SEQ ID NO: 4077 - protein, 19 aa, Artificial Sequence
  Synthetically generated peptide
  VARIANT (1)...(19): Xaa = Any Amino Acid
PGTCGEICXAYXXAACTGC

SEQ ID NO: 4078 - protein, 20 aa, Artificial Sequence
  Synthetically generated peptide
  VARIANT (1)...(20): Xaa = Any Amino Acid
PGTCGEICXAYXXXAACTGC

SEQ ID NO: 4079 - protein, 20 aa, Artificial Sequence
  Synthetically generated peptide
  VARIANT (1)...(20): Xaa = Any Amino Acid
PGTCGEICXAYXXAXACTGC

SEQ ID NO: 4080 - protein, 20 aa, Artificial Sequence
  Synthetically generated peptide
  VARIANT (1)...(20): Xaa = Any Amino Acid
PGTCGEICXAYXXAAXCTGC

SEQ ID NO: 4081 - protein, 20 aa, Artificial Sequence
  Synthetically generated peptide
  VARIANT (1)...(20): Xaa = Any Amino Acid
PGTCGEICXAYXXAACXTGC

SEQ ID NO: 4082 - protein, 20 aa, Artificial Sequence
  Synthetically generated peptide
  VARIANT (1)...(20): Xaa = Any Amino Acid
PGTCGEICXAYXXAACTXGC

SEQ ID NO: 4083 - protein, 20 aa, Artificial Sequence
  Synthetically generated peptide
  VARIANT (1)...(20): Xaa = Any Amino Acid
PGTCGEICXAYXXAACTGXC

SEQ ID NO: 4084 - protein, 20 aa, Artificial Sequence
  Synthetically generated peptide
  VARIANT (1)...(20): Xaa = Any Amino Acid
PGTCGEICXAYXXAACTGCX

SEQ ID NO: 4085 - protein, 19 aa, Artificial Sequence
  Synthetically generated peptide
  VARIANT (1)...(19): Xaa = Any Amino Acid
PGTCGEICXAYXAXACTGC

SEQ ID NO: 4086 - protein, 20 aa, Artificial Sequence
  Synthetically generated peptide
  VARIANT (1)...(20): Xaa = Any Amino Acid
PGTCGEICXAYXAXXACTGC

SEQ ID NO: 4087 - protein, 20 aa, Artificial Sequence
  Synthetically generated peptide
  VARIANT (1)...(20): Xaa = Any Amino Acid
PGTCGEICXAYXAXAXCTGC

SEQ ID NO: 4088 - protein, 20 aa, Artificial Sequence
  Synthetically generated peptide
  VARIANT (1)...(20): Xaa = Any Amino Acid
PGTCGEICXAYXAXACXTGC

SEQ ID NO: 4089 - protein, 20 aa, Artificial Sequence
  Synthetically generated peptide
  VARIANT (1)...(20): Xaa = Any Amino Acid
PGTCGEICXAYXAXACTXGC

SEQ ID NO: 4090 - protein, 20 aa, Artificial Sequence
  Synthetically generated peptide
  VARIANT (1)...(20): Xaa = Any Amino Acid
PGTCGEICXAYXAXACTGXC

SEQ ID NO: 4091 - protein, 20 aa, Artificial Sequence
  Synthetically generated peptide
  VARIANT (1)...(20): Xaa = Any Amino Acid
PGTCGEICXAYXAXACTGCX

SEQ ID NO: 4092 - protein, 19 aa, Artificial Sequence
  Synthetically generated peptide
  VARIANT (1)...(19): Xaa = Any Amino Acid
PGTCGEICXAYXAAXCTGC

SEQ ID NO: 4093 - protein, 20 aa, Artificial Sequence
  Synthetically generated peptide
  VARIANT (1)...(20): Xaa = Any Amino Acid
PGTCGEICXAYXAAXXCTGC

SEQ ID NO: 4094 - protein, 20 aa, Artificial Sequence
  Synthetically generated peptide
  VARIANT (1)...(20): Xaa = Any Amino Acid
PGTCGEICXAYXAAXCXTGC

SEQ ID NO: 4095 - protein, 20 aa, Artificial Sequence
  Synthetically generated peptide
  VARIANT (1)...(20): Xaa = Any Amino Acid
PGTCGEICXAYXAAXCTXGC

SEQ ID NO: 4096 - protein, 20 aa, Artificial Sequence
  Synthetically generated peptide
  VARIANT (1)...(20): Xaa = Any Amino Acid
PGTCGEICXAYXAAXCTGXC

SEQ ID NO: 4097 - protein, 20 aa, Artificial Sequence
  Synthetically generated peptide
  VARIANT (1)...(20): Xaa = Any Amino Acid
PGTCGEICXAYXAAXCTGCX

SEQ ID NO: 4098 - protein, 19 aa, Artificial Sequence
  Synthetically generated peptide
  VARIANT (1)...(19): Xaa = Any Amino Acid
PGTCGEICXAYXAACXTGC

SEQ ID NO: 4099 - protein, 20 aa, Artificial Sequence
  Synthetically generated peptide
  VARIANT (1)...(20): Xaa = Any Amino Acid
PGTCGEICXAYXAACXXTGC

SEQ ID NO: 4100 - protein, 20 aa, Artificial Sequence
  Synthetically generated peptide
  VARIANT (1)...(20): Xaa = Any Amino Acid
PGTCGEICXAYXAACXTXGC

SEQ ID NO: 4101 - protein, 20 aa, Artificial Sequence
  Synthetically generated peptide
  VARIANT (1)...(20): Xaa = Any Amino Acid
PGTCGEICXAYXAACXTGXC

SEQ ID NO: 4102 - protein, 20 aa, Artificial Sequence
  Synthetically generated peptide
  VARIANT (1)...(20): Xaa = Any Amino Acid
PGTCGEICXAYXAACXTGCX

SEQ ID NO: 4103 - protein, 19 aa, Artificial Sequence
  Synthetically generated peptide
  VARIANT (1)...(19): Xaa = Any Amino Acid
PGTCGEICXAYXAACTXGC

SEQ ID NO: 4104 - protein, 20 aa, Artificial Sequence
  Synthetically generated peptide
  VARIANT (1)...(20): Xaa = Any Amino Acid
PGTCGEICXAYXAACTXXGC

SEQ ID NO: 4105 - protein, 20 aa, Artificial Sequence
  Synthetically generated peptide
  VARIANT (1)...(20): Xaa = Any Amino Acid
PGTCGEICXAYXAACTXGXC

SEQ ID NO: 4106 - protein, 20 aa, Artificial Sequence
  Synthetically generated peptide
  VARIANT (1)...(20): Xaa = Any Amino Acid
PGTCGEICXAYXAACTXGCX

SEQ ID NO: 4107 - protein, 19 aa, Artificial Sequence
  Synthetically generated peptide
  VARIANT (1)...(19): Xaa = Any Amino Acid
PGTCGEICXAYXAACTGXC

SEQ ID NO: 4108 - protein, 20 aa, Artificial Sequence
  Synthetically generated peptide
  VARIANT (1)...(20): Xaa = Any Amino Acid
PGTCGEICXAYXAACTGXXC

SEQ ID NO: 4109 - protein, 20 aa, Artificial Sequence
  Synthetically generated peptide
  VARIANT (1)...(20): Xaa = Any Amino Acid
PGTCGEICXAYXAACTGXCX

SEQ ID NO: 4110 - protein, 19 aa, Artificial Sequence
  Synthetically generated peptide
  VARIANT (1)...(19): Xaa = Any Amino Acid
PGTCGEICXAYXAACTGCX

SEQ ID NO: 4111 - protein, 20 aa, Artificial Sequence
  Synthetically generated peptide
  VARIANT (1)...(20): Xaa = Any Amino Acid
PGTCGEICXAYXAACTGCXX

SEQ ID NO: 4112 - protein, 18 aa, Artificial Sequence
  Synthetically generated peptide
  VARIANT (1)...(18): Xaa = Any Amino Acid
PGTCGEICXAYAXACTGC

SEQ ID NO: 4113 - protein, 19 aa, Artificial Sequence
  Synthetically generated peptide
  VARIANT (1)...(19): Xaa = Any Amino Acid
PGTCGEICXAYAXXACTGC

SEQ ID NO: 4114 - protein, 20 aa, Artificial Sequence
  Synthetically generated peptide
  VARIANT (1)...(20): Xaa = Any Amino Acid
PGTCGEICXAYAXXXACTGC

SEQ ID NO: 4115 - protein, 20 aa, Artificial Sequence
  Synthetically generated peptide
  VARIANT (1)...(20): Xaa = Any Amino Acid
PGTCGEICXAYAXXAXCTGC

SEQ ID NO: 4116 - protein, 20 aa, Artificial Sequence
  Synthetically generated peptide
  VARIANT (1)...(20): Xaa = Any Amino Acid
PGTCGEICXAYAXXACXTGC

SEQ ID NO: 4117 - protein, 20 aa, Artificial Sequence
  Synthetically generated peptide
  VARIANT (1)...(20): Xaa = Any Amino Acid
PGTCGEICXAYAXXACTXGC

SEQ ID NO: 4118 - protein, 20 aa, Artificial Sequence
  Synthetically generated peptide
  VARIANT (1)...(20): Xaa = Any Amino Acid
PGTCGEICXAYAXXACTGXC

SEQ ID NO: 4119 - protein, 20 aa, Artificial Sequence
  Synthetically generated peptide
  VARIANT (1)...(20): Xaa = Any Amino Acid
PGTCGEICXAYAXXACTGCX

SEQ ID NO: 4120 - protein, 19 aa, Artificial Sequence
  Synthetically generated peptide
  VARIANT (1)...(19): Xaa = Any Amino Acid
PGTCGEICXAYAXAXCTGC

SEQ ID NO: 4121 - protein, 20 aa, Artificial Sequence
  Synthetically generated peptide
  VARIANT (1)...(20): Xaa = Any Amino Acid
PGTCGEICXAYAXAXXCTGC

SEQ ID NO: 4122 - protein, 20 aa, Artificial Sequence
  Synthetically generated peptide
  VARIANT (1)...(20): Xaa = Any Amino Acid
PGTCGEICXAYAXAXCXTGC

SEQ ID NO: 4123 - protein, 20 aa, Artificial Sequence
  Synthetically generated peptide
  VARIANT (1)...(20): Xaa = Any Amino Acid
PGTCGEICXAYAXAXCTXGC

SEQ ID NO: 4124 - protein, 20 aa, Artificial Sequence
  Synthetically generated peptide
  VARIANT (1)...(20): Xaa = Any Amino Acid
PGTCGEICXAYAXAXCTGXC

SEQ ID NO: 4125 - protein, 20 aa, Artificial Sequence
  Synthetically generated peptide
  VARIANT (1)...(20): Xaa = Any Amino Acid
PGTCGEICXAYAXAXCTGCX

SEQ ID NO: 4126 - protein, 19 aa, Artificial Sequence
  Synthetically generated peptide
  VARIANT (1)...(19): Xaa = Any Amino Acid
PGTCGEICXAYAXACXTGC

SEQ ID NO: 4127 - protein, 20 aa, Artificial Sequence
  Synthetically generated peptide
  VARIANT (1)...(20): Xaa = Any Amino Acid
PGTCGEICXAYAXACXXTGC

SEQ ID NO: 4128 - protein, 20 aa, Artificial Sequence
  Synthetically generated peptide
  VARIANT (1)...(20): Xaa = Any Amino Acid
PGTCGEICXAYAXACXTXGC

SEQ ID NO: 4129 - protein, 20 aa, Artificial Sequence
  Synthetically generated peptide
  VARIANT (1)...(20): Xaa = Any Amino Acid
PGTCGEICXAYAXACXTGXC

SEQ ID NO: 4130 - protein, 20 aa, Artificial Sequence
  Synthetically generated peptide
  VARIANT (1)...(20): Xaa = Any Amino Acid
PGTCGEICXAYAXACXTGCX

SEQ ID NO: 4131 - protein, 19 aa, Artificial Sequence
  Synthetically generated peptide
  VARIANT (1)...(19): Xaa = Any Amino Acid
PGTCGEICXAYAXACTXGC

SEQ ID NO: 4132 - protein, 20 aa, Artificial Sequence
  Synthetically generated peptide
  VARIANT (1)...(20): Xaa = Any Amino Acid
PGTCGEICXAYAXACTXXGC

SEQ ID NO: 4133 - protein, 20 aa, Artificial Sequence
  Synthetically generated peptide
  VARIANT (1)...(20): Xaa = Any Amino Acid
PGTCGEICXAYAXACTXGXC

SEQ ID NO: 4134 - protein, 20 aa, Artificial Sequence
  Synthetically generated peptide
  VARIANT (1)...(20): Xaa = Any Amino Acid
PGTCGEICXAYAXACTXGCX

SEQ ID NO: 4135 - protein, 19 aa, Artificial Sequence
  Synthetically generated peptide
  VARIANT (1)...(19): Xaa = Any Amino Acid
PGTCGEICXAYAXACTGXC

SEQ ID NO: 4136 - protein, 20 aa, Artificial Sequence
  Synthetically generated peptide
  VARIANT (1)...(20): Xaa = Any Amino Acid
PGTCGEICXAYAXACTGXXC

SEQ ID NO: 4137 - protein, 20 aa, Artificial Sequence
  Synthetically generated peptide
  VARIANT (1)...(20): Xaa = Any Amino Acid
PGTCGEICXAYAXACTGXCX

SEQ ID NO: 4138 - protein, 19 aa, Artificial Sequence
  Synthetically generated peptide
  VARIANT (1)...(19): Xaa = Any Amino Acid
PGTCGEICXAYAXACTGCX

SEQ ID NO: 4139 - protein, 20 aa, Artificial Sequence
  Synthetically generated peptide
  VARIANT (1)...(20): Xaa = Any Amino Acid
PGTCGEICXAYAXACTGCXX

SEQ ID NO: 4140 - protein, 18 aa, Artificial Sequence
  Synthetically generated peptide
  VARIANT (1)...(18): Xaa = Any Amino Acid
PGTCGEICXAYAAXCTGC

SEQ ID NO: 4141 - protein, 19 aa, Artificial Sequence
  Synthetically generated peptide
  VARIANT (1)...(19): Xaa = Any Amino Acid
PGTCGEICXAYAAXXCTGC

SEQ ID NO: 4142 - protein, 20 aa, Artificial Sequence
  Synthetically generated peptide
  VARIANT (1)...(20): Xaa = Any Amino Acid
PGTCGEICXAYAAXXXCTGC

SEQ ID NO: 4143 - protein, 20 aa, Artificial Sequence
  Synthetically generated peptide
  VARIANT (1)...(20): Xaa = Any Amino Acid
PGTCGEICXAYAAXXCXTGC

SEQ ID NO: 4144 - protein, 20 aa, Artificial Sequence
  Synthetically generated peptide
  VARIANT (1)...(20): Xaa = Any Amino Acid
PGTCGEICXAYAAXXCTXGC

SEQ ID NO: 4145 - protein, 20 aa, Artificial Sequence
  Synthetically generated peptide
  VARIANT (1)...(20): Xaa = Any Amino Acid
PGTCGEICXAYAAXXCTGXC

SEQ ID NO: 4146 - protein, 20 aa, Artificial Sequence
  Synthetically generated peptide
  VARIANT (1)...(20): Xaa = Any Amino Acid
PGTCGEICXAYAAXXCTGCX

SEQ ID NO: 4147 - protein, 19 aa, Artificial Sequence
  Synthetically generated peptide
  VARIANT (1)...(19): Xaa = Any Amino Acid
PGTCGEICXAYAAXCXTGC

SEQ ID NO: 4148 - protein, 20 aa, Artificial Sequence
  Synthetically generated peptide
  VARIANT (1)...(20): Xaa = Any Amino Acid
PGTCGEICXAYAAXCXXTGC

SEQ ID NO: 4149 - protein, 20 aa, Artificial Sequence
  Synthetically generated peptide
  VARIANT (1)...(20): Xaa = Any Amino Acid
PGTCGEICXAYAAXCXTXGC

SEQ ID NO: 4150 - protein, 20 aa, Artificial Sequence
  Synthetically generated peptide
  VARIANT (1)...(20): Xaa = Any Amino Acid
PGTCGEICXAYAAXCXTGXC

SEQ ID NO: 4151 - protein, 20 aa, Artificial Sequence
  Synthetically generated peptide
  VARIANT (1)...(20): Xaa = Any Amino Acid
PGTCGEICXAYAAXCXTGCX

SEQ ID NO: 4152 - protein, 19 aa, Artificial Sequence
  Synthetically generated peptide
  VARIANT (1)...(19): Xaa = Any Amino Acid
PGTCGEICXAYAAXCTXGC

SEQ ID NO: 4153 - protein, 20 aa, Artificial Sequence
  Synthetically generated peptide
  VARIANT (1)...(20): Xaa = Any Amino Acid
PGTCGEICXAYAAXCTXXGC

SEQ ID NO: 4154 - protein, 20 aa, Artificial Sequence
  Synthetically generated peptide
  VARIANT (1)...(20): Xaa = Any Amino Acid
PGTCGEICXAYAAXCTXGXC

SEQ ID NO: 4155 - protein, 20 aa, Artificial Sequence
  Synthetically generated peptide
  VARIANT (1)...(20): Xaa = Any Amino Acid
PGTCGEICXAYAAXCTXGCX

SEQ ID NO: 4156 - protein, 19 aa, Artificial Sequence
  Synthetically generated peptide
  VARIANT (1)...(19): Xaa = Any Amino Acid
PGTCGEICXAYAAXCTGXC

SEQ ID NO: 4157 - protein, 20 aa, Artificial Sequence
  Synthetically generated peptide
  VARIANT (1)...(20): Xaa = Any Amino Acid
PGTCGEICXAYAAXCTGXXC

SEQ ID NO: 4158 - protein, 20 aa, Artificial Sequence
  Synthetically generated peptide
  VARIANT (1)...(20): Xaa = Any Amino Acid
PGTCGEICXAYAAXCTGXCX

SEQ ID NO: 4159 - protein, 19 aa, Artificial Sequence
  Synthetically generated peptide
  VARIANT (1)...(19): Xaa = Any Amino Acid
PGTCGEICXAYAAXCTGCX

SEQ ID NO: 4160 - protein, 20 aa, Artificial Sequence
  Synthetically generated peptide
  VARIANT (1)...(20): Xaa = Any Amino Acid
PGTCGEICXAYAAXCTGCXX

SEQ ID NO: 4161 - protein, 18 aa, Artificial Sequence
  Synthetically generated peptide
  VARIANT (1)...(18): Xaa = Any Amino Acid
PGTCGEICXAYAACXTGC

SEQ ID NO: 4162 - protein, 19 aa, Artificial Sequence
  Synthetically generated peptide
  VARIANT (1)...(19): Xaa = Any Amino Acid
PGTCGEICXAYAACXXTGC

SEQ ID NO: 4163 - protein, 20 aa, Artificial Sequence
  Synthetically generated peptide
  VARIANT (1)...(20): Xaa = Any Amino Acid
PGTCGEICXAYAACXXXTGC

SEQ ID NO: 4164 - protein, 20 aa, Artificial Sequence
  Synthetically generated peptide
  VARIANT (1)...(20): Xaa = Any Amino Acid
PGTCGEICXAYAACXXTXGC

SEQ ID NO: 4165 - protein, 20 aa, Artificial Sequence
  Synthetically generated peptide
  VARIANT (1)...(20): Xaa = Any Amino Acid
PGTCGEICXAYAACXXTGXC

SEQ ID NO: 4166 - protein, 20 aa, Artificial Sequence
  Synthetically generated peptide
  VARIANT (1)...(20): Xaa = Any Amino Acid
PGTCGEICXAYAACXXTGCX

SEQ ID NO: 4167 - protein, 19 aa, Artificial Sequence
  Synthetically generated peptide
  VARIANT (1)...(19): Xaa = Any Amino Acid
PGTCGEICXAYAACXTXGC

SEQ ID NO: 4168 - protein, 20 aa, Artificial Sequence
  Synthetically generated peptide
  VARIANT (1)...(20): Xaa = Any Amino Acid
PGTCGEICXAYAACXTXXGC

SEQ ID NO: 4169 - protein, 20 aa, Artificial Sequence
  Synthetically generated peptide
  VARIANT (1)...(20): Xaa = Any Amino Acid
PGTCGEICXAYAACXTXGXC

SEQ ID NO: 4170 - protein, 20 aa, Artificial Sequence
  Synthetically generated peptide
  VARIANT (1)...(20): Xaa = Any Amino Acid
PGTCGEICXAYAACXTXGCX

SEQ ID NO: 4171 - protein, 19 aa, Artificial Sequence
  Synthetically generated peptide
  VARIANT (1)...(19): Xaa = Any Amino Acid
PGTCGEICXAYAACXTGXC

SEQ ID NO: 4172 - protein, 20 aa, Artificial Sequence
  Synthetically generated peptide
  VARIANT (1)...(20): Xaa = Any Amino Acid
PGTCGEICXAYAACXTGXXC

SEQ ID NO: 4173 - protein, 20 aa, Artificial Sequence
  Synthetically generated peptide
  VARIANT (1)...(20): Xaa = Any Amino Acid
PGTCGEICXAYAACXTGXCX

SEQ ID NO: 4174 - protein, 19 aa, Artificial Sequence
  Synthetically generated peptide
  VARIANT (1)...(19): Xaa = Any Amino Acid
PGTCGEICXAYAACXTGCX

SEQ ID NO: 4175 - protein, 20 aa, Artificial Sequence
  Synthetically generated peptide
  VARIANT (1)...(20): Xaa = Any Amino Acid
PGTCGEICXAYAACXTGCXX

SEQ ID NO: 4176 - protein, 18 aa, Artificial Sequence
  Synthetically generated peptide
  VARIANT (1)...(18): Xaa = Any Amino Acid
PGTCGEICXAYAACTXGC

SEQ ID NO: 4177 - protein, 19 aa, Artificial Sequence
  Synthetically generated peptide
  VARIANT (1)...(19): Xaa = Any Amino Acid
PGTCGEICXAYAACTXXGC

SEQ ID NO: 4178 - protein, 20 aa, Artificial Sequence
  Synthetically generated peptide
  VARIANT (1)...(20): Xaa = Any Amino Acid
PGTCGEICXAYAACTXXXGC

SEQ ID NO: 4179 - protein, 20 aa, Artificial Sequence
  Synthetically generated peptide
  VARIANT (1)...(20): Xaa = Any Amino Acid
PGTCGEICXAYAACTXXGXC

SEQ ID NO: 4180 - protein, 20 aa, Artificial Sequence
  Synthetically generated peptide
  VARIANT (1)...(20): Xaa = Any Amino Acid
PGTCGEICXAYAACTXXGCX

SEQ ID NO: 4181 - protein, 19 aa, Artificial Sequence
  Synthetically generated peptide
  VARIANT (1)...(19): Xaa = Any Amino Acid
PGTCGEICXAYAACTXGXC

SEQ ID NO: 4182 - protein, 20 aa, Artificial Sequence
  Synthetically generated peptide
  VARIANT (1)...(20): Xaa = Any Amino Acid
PGTCGEICXAYAACTXGXXC

SEQ ID NO: 4183 - protein, 20 aa, Artificial Sequence
  Synthetically generated peptide
  VARIANT (1)...(20): Xaa = Any Amino Acid
PGTCGEICXAYAACTXGXCX

SEQ ID NO: 4184 - protein, 19 aa, Artificial Sequence
  Synthetically generated peptide
  VARIANT (1)...(19): Xaa = Any Amino Acid
PGTCGEICXAYAACTXGCX

SEQ ID NO: 4185 - protein, 20 aa, Artificial Sequence
  Synthetically generated peptide
  VARIANT (1)...(20): Xaa = Any Amino Acid
PGTCGEICXAYAACTXGCXX

SEQ ID NO: 4186 - protein, 18 aa, Artificial Sequence
  Synthetically generated peptide
  VARIANT (1)...(18): Xaa = Any Amino Acid
PGTCGEICXAYAACTGXC

SEQ ID NO: 4187 - protein, 19 aa, Artificial Sequence
  Synthetically generated peptide
  VARIANT (1)...(19): Xaa = Any Amino Acid
PGTCGEICXAYAACTGXXC

SEQ ID NO: 4188 - protein, 20 aa, Artificial Sequence
  Synthetically generated peptide
  VARIANT (1)...(20): Xaa = Any Amino Acid
PGTCGEICXAYAACTGXXXC

SEQ ID NO: 4189 - protein, 20 aa, Artificial Sequence
  Synthetically generated peptide
  VARIANT (1)...(20): Xaa = Any Amino Acid
PGTCGEICXAYAACTGXXCX

SEQ ID NO: 4190 - protein, 19 aa, Artificial Sequence
  Synthetically generated peptide
  VARIANT (1)...(19): Xaa = Any Amino Acid
PGTCGEICXAYAACTGXCX

SEQ ID NO: 4191 - protein, 20 aa, Artificial Sequence
  Synthetically generated peptide
  VARIANT (1)...(20): Xaa = Any Amino Acid
PGTCGEICXAYAACTGXCXX

SEQ ID NO: 4192 - protein, 18 aa, Artificial Sequence
  Synthetically generated peptide
  VARIANT (1)...(18): Xaa = Any Amino Acid
PGTCGEICXAYAACTGCX

SEQ ID NO: 4193 - protein, 19 aa, Artificial Sequence
  Synthetically generated peptide
  VARIANT (1)...(19): Xaa = Any Amino Acid
PGTCGEICXAYAACTGCXX

SEQ ID NO: 4194 - protein, 20 aa, Artificial Sequence
  Synthetically generated peptide
  VARIANT (1)...(20): Xaa = Any Amino Acid
PGTCGEICXAYAACTGCXXX

SEQ ID NO: 4195 - protein, 17 aa, Artificial Sequence
  Synthetically generated peptide
  VARIANT (1)...(17): Xaa = Any Amino Acid
PGTCGEICAXYAACTGC

SEQ ID NO: 4196 - protein, 18 aa, Artificial Sequence
  Synthetically generated peptide
  VARIANT (1)...(18): Xaa = Any Amino Acid
PGTCGEICAXXYAACTGC

SEQ ID NO: 4197 - protein, 19 aa, Artificial Sequence
  Synthetically generated peptide
  VARIANT (1)...(19): Xaa = Any Amino Acid
PGTCGEICAXXXYAACTGC

SEQ ID NO: 4198 - protein, 20 aa, Artificial Sequence
  Synthetically generated peptide
  VARIANT (1)...(20): Xaa = Any Amino Acid
PGTCGEICAXXXXYAACTGC

SEQ ID NO: 4199 - protein, 20 aa, Artificial Sequence
  Synthetically generated peptide
  VARIANT (1)...(20): Xaa = Any Amino Acid
PGTCGEICAXXXYXAACTGC

SEQ ID NO: 4200 - protein, 20 aa, Artificial Sequence
  Synthetically generated peptide
  VARIANT (1)...(20): Xaa = Any Amino Acid
PGTCGEICAXXXYAXACTGC

SEQ ID NO: 4201 - protein, 20 aa, Artificial Sequence
  Synthetically generated peptide
  VARIANT (1)...(20): Xaa = Any Amino Acid
PGTCGEICAXXXYAAXCTGC

SEQ ID NO: 4202 - protein, 20 aa, Artificial Sequence
  Synthetically generated peptide
  VARIANT (1)...(20): Xaa = Any Amino Acid
PGTCGEICAXXXYAACXTGC

SEQ ID NO: 4203 - protein, 20 aa, Artificial Sequence
  Synthetically generated peptide
  VARIANT (1)...(20): Xaa = Any Amino Acid
PGTCGEICAXXXYAACTXGC

SEQ ID NO: 4204 - protein, 20 aa, Artificial Sequence
  Synthetically generated peptide
  VARIANT (1)...(20): Xaa = Any Amino Acid
PGTCGEICAXXXYAACTGXC

SEQ ID NO: 4205 - protein, 20 aa, Artificial Sequence
  Synthetically generated peptide
  VARIANT (1)...(20): Xaa = Any Amino Acid
PGTCGEICAXXXYAACTGCX

SEQ ID NO: 4206 - protein, 19 aa, Artificial Sequence
  Synthetically generated peptide
  VARIANT (1)...(19): Xaa = Any Amino Acid
PGTCGEICAXXYXAACTGC

SEQ ID NO: 4207 - protein, 20 aa, Artificial Sequence
  Synthetically generated peptide
  VARIANT (1)...(20): Xaa = Any Amino Acid
PGTCGEICAXXYXXAACTGC

SEQ ID NO: 4208 - protein, 20 aa, Artificial Sequence
  Synthetically generated peptide
  VARIANT (1)...(20): Xaa = Any Amino Acid
PGTCGEICAXXYXAXACTGC

SEQ ID NO: 4209 - protein, 20 aa, Artificial Sequence
  Synthetically generated peptide
  VARIANT (1)...(20): Xaa = Any Amino Acid
PGTCGEICAXXYXAAXCTGC

SEQ ID NO: 4210 - protein, 20 aa, Artificial Sequence
  Synthetically generated peptide
  VARIANT (1)...(20): Xaa = Any Amino Acid
PGTCGEICAXXYXAACXTGC

SEQ ID NO: 4211 - protein, 20 aa, Artificial Sequence
  Synthetically generated peptide
  VARIANT (1)...(20): Xaa = Any Amino Acid
PGTCGEICAXXYXAACTXGC

SEQ ID NO: 4212 - protein, 20 aa, Artificial Sequence
  Synthetically generated peptide
  VARIANT (1)...(20): Xaa = Any Amino Acid
PGTCGEICAXXYXAACTGXC

SEQ ID NO: 4213 - protein, 20 aa, Artificial Sequence
  Synthetically generated peptide
  VARIANT (1)...(20): Xaa = Any Amino Acid
PGTCGEICAXXYXAACTGCX

SEQ ID NO: 4214 - protein, 19 aa, Artificial Sequence
  Synthetically generated peptide
  VARIANT (1)...(19): Xaa = Any Amino Acid
PGTCGEICAXXYAXACTGC

SEQ ID NO: 4215 - protein, 20 aa, Artificial Sequence
  Synthetically generated peptide
  VARIANT (1)...(20): Xaa = Any Amino Acid
PGTCGEICAXXYAXXACTGC

SEQ ID NO: 4216 - protein, 20 aa, Artificial Sequence
  Synthetically generated peptide
  VARIANT (1)...(20): Xaa = Any Amino Acid
PGTCGEICAXXYAXAXCTGC

SEQ ID NO: 4217 - protein, 20 aa, Artificial Sequence
  Synthetically generated peptide
  VARIANT (1)...(20): Xaa = Any Amino Acid
PGTCGEICAXXYAXACXTGC

SEQ ID NO: 4218 - protein, 20 aa, Artificial Sequence
  Synthetically generated peptide
  VARIANT (1)...(20): Xaa = Any Amino Acid
PGTCGEICAXXYAXACTXGC

SEQ ID NO: 4219 - protein, 20 aa, Artificial Sequence
  Synthetically generated peptide
  VARIANT (1)...(20): Xaa = Any Amino Acid
PGTCGEICAXXYAXACTGXC

SEQ ID NO: 4220 - protein, 20 aa, Artificial Sequence
  Synthetically generated peptide
  VARIANT (1)...(20): Xaa = Any Amino Acid
PGTCGEICAXXYAXACTGCX

SEQ ID NO: 4221 - protein, 19 aa, Artificial Sequence
  Synthetically generated peptide
  VARIANT (1)...(19): Xaa = Any Amino Acid
PGTCGEICAXXYAAXCTGC

SEQ ID NO: 4222 - protein, 20 aa, Artificial Sequence
  Synthetically generated peptide
  VARIANT (1)...(20): Xaa = Any Amino Acid
PGTCGEICAXXYAAXXCTGC

SEQ ID NO: 4223 - protein, 20 aa, Artificial Sequence
  Synthetically generated peptide
  VARIANT (1)...(20): Xaa = Any Amino Acid
PGTCGEICAXXYAAXCXTGC

SEQ ID NO: 4224 - protein, 20 aa, Artificial Sequence
  Synthetically generated peptide
  VARIANT (1)...(20): Xaa = Any Amino Acid
PGTCGEICAXXYAAXCTXGC

SEQ ID NO: 4225 - protein, 20 aa, Artificial Sequence
  Synthetically generated peptide
  VARIANT (1)...(20): Xaa = Any Amino Acid
PGTCGEICAXXYAAXCTGXC

SEQ ID NO: 4226 - protein, 20 aa, Artificial Sequence
  Synthetically generated peptide
  VARIANT (1)...(20): Xaa = Any Amino Acid
PGTCGEICAXXYAAXCTGCX

SEQ ID NO: 4227 - protein, 19 aa, Artificial Sequence
  Synthetically generated peptide
  VARIANT (1)...(19): Xaa = Any Amino Acid
PGTCGEICAXXYAACXTGC

SEQ ID NO: 4228 - protein, 20 aa, Artificial Sequence
  Synthetically generated peptide
  VARIANT (1)...(20): Xaa = Any Amino Acid
PGTCGEICAXXYAACXXTGC

SEQ ID NO: 4229 - protein, 20 aa, Artificial Sequence
  Synthetically generated peptide
  VARIANT (1)...(20): Xaa = Any Amino Acid
PGTCGEICAXXYAACXTXGC

SEQ ID NO: 4230 - protein, 20 aa, Artificial Sequence
  Synthetically generated peptide
  VARIANT (1)...(20): Xaa = Any Amino Acid
PGTCGEICAXXYAACXTGXC

SEQ ID NO: 4231 - protein, 20 aa, Artificial Sequence
  Synthetically generated peptide
  VARIANT (1)...(20): Xaa = Any Amino Acid
PGTCGEICAXXYAACXTGCX

SEQ ID NO: 4232 - protein, 19 aa, Artificial Sequence
  Synthetically generated peptide
  VARIANT (1)...(19): Xaa = Any Amino Acid
PGTCGEICAXXYAACTXGC

SEQ ID NO: 4233 - protein, 20 aa, Artificial Sequence
  Synthetically generated peptide
  VARIANT (1)...(20): Xaa = Any Amino Acid
PGTCGEICAXXYAACTXXGC

SEQ ID NO: 4234 - protein, 20 aa, Artificial Sequence
  Synthetically generated peptide
  VARIANT (1)...(20): Xaa = Any Amino Acid
PGTCGEICAXXYAACTXGXC

SEQ ID NO: 4235 - protein, 20 aa, Artificial Sequence
  Synthetically generated peptide
  VARIANT (1)...(20): Xaa = Any Amino Acid
PGTCGEICAXXYAACTXGCX

SEQ ID NO: 4236 - protein, 19 aa, Artificial Sequence
  Synthetically generated peptide
  VARIANT (1)...(19): Xaa = Any Amino Acid
PGTCGEICAXXYAACTGXC

SEQ ID NO: 4237 - protein, 20 aa, Artificial Sequence
  Synthetically generated peptide
  VARIANT (1)...(20): Xaa = Any Amino Acid
PGTCGEICAXXYAACTGXXC

SEQ ID NO: 4238 - protein, 20 aa, Artificial Sequence
  Synthetically generated peptide
  VARIANT (1)...(20): Xaa = Any Amino Acid
PGTCGEICAXXYAACTGXCX

SEQ ID NO: 4239 - protein, 19 aa, Artificial Sequence
  Synthetically generated peptide
  VARIANT (1)...(19): Xaa = Any Amino Acid
PGTCGEICAXXYAACTGCX

SEQ ID NO: 4240 - protein, 20 aa, Artificial Sequence
  Synthetically generated peptide
  VARIANT (1)...(20): Xaa = Any Amino Acid
PGTCGEICAXXYAACTGCXX

SEQ ID NO: 4241 - protein, 18 aa, Artificial Sequence
  Synthetically generated peptide
  VARIANT (1)...(18): Xaa = Any Amino Acid
PGTCGEICAXYXAACTGC

SEQ ID NO: 4242 - protein, 19 aa, Artificial Sequence
  Synthetically generated peptide
  VARIANT (1)...(19): Xaa = Any Amino Acid
PGTCGEICAXYXXAACTGC

SEQ ID NO: 4243 - protein, 20 aa, Artificial Sequence
  Synthetically generated peptide
  VARIANT (1)...(20): Xaa = Any Amino Acid
PGTCGEICAXYXXXAACTGC

SEQ ID NO: 4244 - protein, 20 aa, Artificial Sequence
  Synthetically generated peptide
  VARIANT (1)...(20): Xaa = Any Amino Acid
PGTCGEICAXYXXAXACTGC

SEQ ID NO: 4245 - protein, 20 aa, Artificial Sequence
  Synthetically generated peptide
  VARIANT (1)...(20): Xaa = Any Amino Acid
PGTCGEICAXYXXAAXCTGC

SEQ ID NO: 4246 - protein, 20 aa, Artificial Sequence
  Synthetically generated peptide
  VARIANT (1)...(20): Xaa = Any Amino Acid
PGTCGEICAXYXXAACXTGC

SEQ ID NO: 4247 - protein, 20 aa, Artificial Sequence
  Synthetically generated peptide
  VARIANT (1)...(20): Xaa = Any Amino Acid
PGTCGEICAXYXXAACTXGC

SEQ ID NO: 4248 - protein, 20 aa, Artificial Sequence
  Synthetically generated peptide
  VARIANT (1)...(20): Xaa = Any Amino Acid
PGTCGEICAXYXXAACTGXC

SEQ ID NO: 4249 - protein, 20 aa, Artificial Sequence
  Synthetically generated peptide
  VARIANT (1)...(20): Xaa = Any Amino Acid
PGTCGEICAXYXXAACTGCX

SEQ ID NO: 4250 - protein, 19 aa, Artificial Sequence
  Synthetically generated peptide
  VARIANT (1)...(19): Xaa = Any Amino Acid
PGTCGEICAXYXAXACTGC

SEQ ID NO: 4251 - protein, 20 aa, Artificial Sequence
  Synthetically generated peptide
  VARIANT (1)...(20): Xaa = Any Amino Acid
PGTCGEICAXYXAXXACTGC

SEQ ID NO: 4252 - protein, 20 aa, Artificial Sequence
  Synthetically generated peptide
  VARIANT (1)...(20): Xaa = Any Amino Acid
PGTCGEICAXYXAXAXCTGC

SEQ ID NO: 4253 - protein, 20 aa, Artificial Sequence
  Synthetically generated peptide
  VARIANT (1)...(20): Xaa = Any Amino Acid
PGTCGEICAXYXAXACXTGC

SEQ ID NO: 4254 - protein, 20 aa, Artificial Sequence
  Synthetically generated peptide
  VARIANT (1)...(20): Xaa = Any Amino Acid
PGTCGEICAXYXAXACTXGC

SEQ ID NO: 4255 - protein, 20 aa, Artificial Sequence
  Synthetically generated peptide
  VARIANT (1)...(20): Xaa = Any Amino Acid
PGTCGEICAXYXAXACTGXC

SEQ ID NO: 4256 - protein, 20 aa, Artificial Sequence
  Synthetically generated peptide
  VARIANT (1)...(20): Xaa = Any Amino Acid
PGTCGEICAXYXAXACTGCX

SEQ ID NO: 4257 - protein, 19 aa, Artificial Sequence
  Synthetically generated peptide
  VARIANT (1)...(19): Xaa = Any Amino Acid
PGTCGEICAXYXAAXCTGC

SEQ ID NO: 4258 - protein, 20 aa, Artificial Sequence
  Synthetically generated peptide
  VARIANT (1)...(20): Xaa = Any Amino Acid
PGTCGEICAXYXAAXXCTGC

SEQ ID NO: 4259 - protein, 20 aa, Artificial Sequence
  Synthetically generated peptide
  VARIANT (1)...(20): Xaa = Any Amino Acid
PGTCGEICAXYXAAXCXTGC

SEQ ID NO: 4260 - protein, 20 aa, Artificial Sequence
  Synthetically generated peptide
  VARIANT (1)...(20): Xaa = Any Amino Acid
PGTCGEICAXYXAAXCTXGC

SEQ ID NO: 4261 - protein, 20 aa, Artificial Sequence
  Synthetically generated peptide
  VARIANT (1)...(20): Xaa = Any Amino Acid
PGTCGEICAXYXAAXCTGXC

SEQ ID NO: 4262 - protein, 20 aa, Artificial Sequence
  Synthetically generated peptide
  VARIANT (1)...(20): Xaa = Any Amino Acid
PGTCGEICAXYXAAXCTGCX

SEQ ID NO: 4263 - protein, 19 aa, Artificial Sequence
  Synthetically generated peptide
  VARIANT (1)...(19): Xaa = Any Amino Acid
PGTCGEICAXYXAACXTGC

SEQ ID NO: 4264 - protein, 20 aa, Artificial Sequence
  Synthetically generated peptide
  VARIANT (1)...(20): Xaa = Any Amino Acid
PGTCGEICAXYXAACXXTGC

SEQ ID NO: 4265 - protein, 20 aa, Artificial Sequence
  Synthetically generated peptide
  VARIANT (1)...(20): Xaa = Any Amino Acid
PGTCGEICAXYXAACXTXGC

SEQ ID NO: 4266 - protein, 20 aa, Artificial Sequence
  Synthetically generated peptide
  VARIANT (1)...(20): Xaa = Any Amino Acid
PGTCGEICAXYXAACXTGXC

SEQ ID NO: 4267 - protein, 20 aa, Artificial Sequence
  Synthetically generated peptide
  VARIANT (1)...(20): Xaa = Any Amino Acid
PGTCGEICAXYXAACXTGCX

SEQ ID NO: 4268 - protein, 19 aa, Artificial Sequence
  Synthetically generated peptide
  VARIANT (1)...(19): Xaa = Any Amino Acid
PGTCGEICAXYXAACTXGC

SEQ ID NO: 4269 - protein, 20 aa, Artificial Sequence
  Synthetically generated peptide
  VARIANT (1)...(20): Xaa = Any Amino Acid
PGTCGEICAXYXAACTXXGC

SEQ ID NO: 4270 - protein, 20 aa, Artificial Sequence
  Synthetically generated peptide
  VARIANT (1)...(20): Xaa = Any Amino Acid
PGTCGEICAXYXAACTXGXC

SEQ ID NO: 4271 - protein, 20 aa, Artificial Sequence
  Synthetically generated peptide
  VARIANT (1)...(20): Xaa = Any Amino Acid
PGTCGEICAXYXAACTXGCX

SEQ ID NO: 4272 - protein, 19 aa, Artificial Sequence
  Synthetically generated peptide
  VARIANT (1)...(19): Xaa = Any Amino Acid
PGTCGEICAXYXAACTGXC

SEQ ID NO: 4273 - protein, 20 aa, Artificial Sequence
  Synthetically generated peptide
  VARIANT (1)...(20): Xaa = Any Amino Acid
PGTCGEICAXYXAACTGXXC

SEQ ID NO: 4274 - protein, 20 aa, Artificial Sequence
  Synthetically generated peptide
  VARIANT (1)...(20): Xaa = Any Amino Acid
PGTCGEICAXYXAACTGXCX

SEQ ID NO: 4275 - protein, 19 aa, Artificial Sequence
  Synthetically generated peptide
  VARIANT (1)...(19): Xaa = Any Amino Acid
PGTCGEICAXYXAACTGCX

SEQ ID NO: 4276 - protein, 20 aa, Artificial Sequence
  Synthetically generated peptide
  VARIANT (1)...(20): Xaa = Any Amino Acid
PGTCGEICAXYXAACTGCXX

SEQ ID NO: 4277 - protein, 18 aa, Artificial Sequence
  Synthetically generated peptide
  VARIANT (1)...(18): Xaa = Any Amino Acid
PGTCGEICAXYAXACTGC

SEQ ID NO: 4278 - protein, 19 aa, Artificial Sequence
  Synthetically generated peptide
  VARIANT (1)...(19): Xaa = Any Amino Acid
PGTCGEICAXYAXXACTGC

SEQ ID NO: 4279 - protein, 20 aa, Artificial Sequence
  Synthetically generated peptide
  VARIANT (1)...(20): Xaa = Any Amino Acid
PGTCGEICAXYAXXXACTGC

SEQ ID NO: 4280 - protein, 20 aa, Artificial Sequence
  Synthetically generated peptide
  VARIANT (1)...(20): Xaa = Any Amino Acid
PGTCGEICAXYAXXAXCTGC

SEQ ID NO: 4281 - protein, 20 aa, Artificial Sequence
  Synthetically generated peptide
  VARIANT (1)...(20): Xaa = Any Amino Acid
PGTCGEICAXYAXXACXTGC

SEQ ID NO: 4282 - protein, 20 aa, Artificial Sequence
  Synthetically generated peptide
  VARIANT (1)...(20): Xaa = Any Amino Acid
PGTCGEICAXYAXXACTXGC

SEQ ID NO: 4283 - protein, 20 aa, Artificial Sequence
  Synthetically generated peptide
  VARIANT (1)...(20): Xaa = Any Amino Acid
PGTCGEICAXYAXXACTGXC

SEQ ID NO: 4284 - protein, 20 aa, Artificial Sequence
  Synthetically generated peptide
  VARIANT (1)...(20): Xaa = Any Amino Acid
PGTCGEICAXYAXXACTGCX

SEQ ID NO: 4285 - protein, 19 aa, Artificial Sequence
  Synthetically generated peptide
  VARIANT (1)...(19): Xaa = Any Amino Acid
PGTCGEICAXYAXAXCTGC

SEQ ID NO: 4286 - protein, 20 aa, Artificial Sequence
  Synthetically generated peptide
  VARIANT (1)...(20): Xaa = Any Amino Acid
PGTCGEICAXYAXAXXCTGC

SEQ ID NO: 4287 - protein, 20 aa, Artificial Sequence
  Synthetically generated peptide
  VARIANT (1)...(20): Xaa = Any Amino Acid
PGTCGEICAXYAXAXCXTGC

SEQ ID NO: 4288 - protein, 20 aa, Artificial Sequence
  Synthetically generated peptide
  VARIANT (1)...(20): Xaa = Any Amino Acid
PGTCGEICAXYAXAXCTXGC

SEQ ID NO: 4289 - protein, 20 aa, Artificial Sequence
  Synthetically generated peptide
  VARIANT (1)...(20): Xaa = Any Amino Acid
PGTCGEICAXYAXAXCTGXC

SEQ ID NO: 4290 - protein, 20 aa, Artificial Sequence
  Synthetically generated peptide
  VARIANT (1)...(20): Xaa = Any Amino Acid
PGTCGEICAXYAXAXCTGCX

SEQ ID NO: 4291 - protein, 19 aa, Artificial Sequence
  Synthetically generated peptide
  VARIANT (1)...(19): Xaa = Any Amino Acid
PGTCGEICAXYAXACXTGC

SEQ ID NO: 4292 - protein, 20 aa, Artificial Sequence
  Synthetically generated peptide
  VARIANT (1)...(20): Xaa = Any Amino Acid
PGTCGEICAXYAXACXXTGC

SEQ ID NO: 4293 - protein, 20 aa, Artificial Sequence
  Synthetically generated peptide
  VARIANT (1)...(20): Xaa = Any Amino Acid
PGTCGEICAXYAXACXTXGC

SEQ ID NO: 4294 - protein, 20 aa, Artificial Sequence
  Synthetically generated peptide
  VARIANT (1)...(20): Xaa = Any Amino Acid
PGTCGEICAXYAXACXTGXC

SEQ ID NO: 4295 - protein, 20 aa, Artificial Sequence
  Synthetically generated peptide
  VARIANT (1)...(20): Xaa = Any Amino Acid
PGTCGEICAXYAXACXTGCX

SEQ ID NO: 4296 - protein, 19 aa, Artificial Sequence
  Synthetically generated peptide
  VARIANT (1)...(19): Xaa = Any Amino Acid
PGTCGEICAXYAXACTXGC

SEQ ID NO: 4297 - protein, 20 aa, Artificial Sequence
  Synthetically generated peptide
  VARIANT (1)...(20): Xaa = Any Amino Acid
PGTCGEICAXYAXACTXXGC

SEQ ID NO: 4298 - protein, 20 aa, Artificial Sequence
  Synthetically generated peptide
  VARIANT (1)...(20): Xaa = Any Amino Acid
PGTCGEICAXYAXACTXGXC

SEQ ID NO: 4299 - protein, 20 aa, Artificial Sequence
  Synthetically generated peptide
  VARIANT (1)...(20): Xaa = Any Amino Acid
PGTCGEICAXYAXACTXGCX

SEQ ID NO: 4300 - protein, 19 aa, Artificial Sequence
  Synthetically generated peptide
  VARIANT (1)...(19): Xaa = Any Amino Acid
PGTCGEICAXYAXACTGXC

SEQ ID NO: 4301 - protein, 20 aa, Artificial Sequence
  Synthetically generated peptide
  VARIANT (1)...(20): Xaa = Any Amino Acid
PGTCGEICAXYAXACTGXXC

SEQ ID NO: 4302 - protein, 20 aa, Artificial Sequence
  Synthetically generated peptide
  VARIANT (1)...(20): Xaa = Any Amino Acid
PGTCGEICAXYAXACTGXCX

SEQ ID NO: 4303 - protein, 19 aa, Artificial Sequence
  Synthetically generated peptide
  VARIANT (1)...(19): Xaa = Any Amino Acid
PGTCGEICAXYAXACTGCX

SEQ ID NO: 4304 - protein, 20 aa, Artificial Sequence
  Synthetically generated peptide
  VARIANT (1)...(20): Xaa = Any Amino Acid
PGTCGEICAXYAXACTGCXX

SEQ ID NO: 4305 - protein, 18 aa, Artificial Sequence
  Synthetically generated peptide
  VARIANT (1)...(18): Xaa = Any Amino Acid
PGTCGEICAXYAAXCTGC

SEQ ID NO: 4306 - protein, 19 aa, Artificial Sequence
  Synthetically generated peptide
  VARIANT (1)...(19): Xaa = Any Amino Acid
PGTCGEICAXYAAXXCTGC

SEQ ID NO: 4307 - protein, 20 aa, Artificial Sequence
  Synthetically generated peptide
  VARIANT (1)...(20): Xaa = Any Amino Acid
PGTCGEICAXYAAXXXCTGC

SEQ ID NO: 4308 - protein, 20 aa, Artificial Sequence
  Synthetically generated peptide
  VARIANT (1)...(20): Xaa = Any Amino Acid
PGTCGEICAXYAAXXCXTGC

SEQ ID NO: 4309 - protein, 20 aa, Artificial Sequence
  Synthetically generated peptide
  VARIANT (1)...(20): Xaa = Any Amino Acid
PGTCGEICAXYAAXXCTXGC

SEQ ID NO: 4310 - protein, 20 aa, Artificial Sequence
  Synthetically generated peptide
  VARIANT (1)...(20): Xaa = Any Amino Acid
PGTCGEICAXYAAXXCTGXC

SEQ ID NO: 4311 - protein, 20 aa, Artificial Sequence
  Synthetically generated peptide
  VARIANT (1)...(20): Xaa = Any Amino Acid
PGTCGEICAXYAAXXCTGCX

SEQ ID NO: 4312 - protein, 19 aa, Artificial Sequence
  Synthetically generated peptide
  VARIANT (1)...(19): Xaa = Any Amino Acid
PGTCGEICAXYAAXCXTGC

SEQ ID NO: 4313 - protein, 20 aa, Artificial Sequence
  Synthetically generated peptide
  VARIANT (1)...(20): Xaa = Any Amino Acid
PGTCGEICAXYAAXCXXTGC

SEQ ID NO: 4314 - protein, 20 aa, Artificial Sequence
  Synthetically generated peptide
  VARIANT (1)...(20): Xaa = Any Amino Acid
PGTCGEICAXYAAXCXTXGC

SEQ ID NO: 4315 - protein, 20 aa, Artificial Sequence
  Synthetically generated peptide
  VARIANT (1)...(20): Xaa = Any Amino Acid
PGTCGEICAXYAAXCXTGXC

SEQ ID NO: 4316 - protein, 20 aa, Artificial Sequence
  Synthetically generated peptide
  VARIANT (1)...(20): Xaa = Any Amino Acid
PGTCGEICAXYAAXCXTGCX

SEQ ID NO: 4317 - protein, 19 aa, Artificial Sequence
  Synthetically generated peptide
  VARIANT (1)...(19): Xaa = Any Amino Acid
PGTCGEICAXYAAXCTXGC

SEQ ID NO: 4318 - protein, 20 aa, Artificial Sequence
  Synthetically generated peptide
  VARIANT (1)...(20): Xaa = Any Amino Acid
PGTCGEICAXYAAXCTXXGC

SEQ ID NO: 4319 - protein, 20 aa, Artificial Sequence
  Synthetically generated peptide
  VARIANT (1)...(20): Xaa = Any Amino Acid
PGTCGEICAXYAAXCTXGXC

SEQ ID NO: 4320 - protein, 20 aa, Artificial Sequence
  Synthetically generated peptide
  VARIANT (1)...(20): Xaa = Any Amino Acid
PGTCGEICAXYAAXCTXGCX

SEQ ID NO: 4321 - protein, 19 aa, Artificial Sequence
  Synthetically generated peptide
  VARIANT (1)...(19): Xaa = Any Amino Acid
PGTCGEICAXYAAXCTGXC

SEQ ID NO: 4322 - protein, 20 aa, Artificial Sequence
  Synthetically generated peptide
  VARIANT (1)...(20): Xaa = Any Amino Acid
PGTCGEICAXYAAXCTGXXC

SEQ ID NO: 4323 - protein, 20 aa, Artificial Sequence
  Synthetically generated peptide
  VARIANT (1)...(20): Xaa = Any Amino Acid
PGTCGEICAXYAAXCTGXCX

SEQ ID NO: 4324 - protein, 19 aa, Artificial Sequence
  Synthetically generated peptide
  VARIANT (1)...(19): Xaa = Any Amino Acid
PGTCGEICAXYAAXCTGCX

SEQ ID NO: 4325 - protein, 20 aa, Artificial Sequence
  Synthetically generated peptide
  VARIANT (1)...(20): Xaa = Any Amino Acid
PGTCGEICAXYAAXCTGCXX

SEQ ID NO: 4326 - protein, 18 aa, Artificial Sequence
  Synthetically generated peptide
  VARIANT (1)...(18): Xaa = Any Amino Acid
PGTCGEICAXYAACXTGC

SEQ ID NO: 4327 - protein, 19 aa, Artificial Sequence
  Synthetically generated peptide
  VARIANT (1)...(19): Xaa = Any Amino Acid
PGTCGEICAXYAACXXTGC

SEQ ID NO: 4328 - protein, 20 aa, Artificial Sequence
  Synthetically generated peptide
  VARIANT (1)...(20): Xaa = Any Amino Acid
PGTCGEICAXYAACXXXTGC

SEQ ID NO: 4329 - protein, 20 aa, Artificial Sequence
  Synthetically generated peptide
  VARIANT (1)...(20): Xaa = Any Amino Acid
PGTCGEICAXYAACXXTXGC

SEQ ID NO: 4330 - protein, 20 aa, Artificial Sequence
  Synthetically generated peptide
  VARIANT (1)...(20): Xaa = Any Amino Acid
PGTCGEICAXYAACXXTGXC

SEQ ID NO: 4331 - protein, 20 aa, Artificial Sequence
  Synthetically generated peptide
  VARIANT (1)...(20): Xaa = Any Amino Acid
PGTCGEICAXYAACXXTGCX

SEQ ID NO: 4332 - protein, 19 aa, Artificial Sequence
  Synthetically generated peptide
  VARIANT (1)...(19): Xaa = Any Amino Acid
PGTCGEICAXYAACXTXGC

SEQ ID NO: 4333 - protein, 20 aa, Artificial Sequence
  Synthetically generated peptide
  VARIANT (1)...(20): Xaa = Any Amino Acid
PGTCGEICAXYAACXTXXGC

SEQ ID NO: 4334 - protein, 20 aa, Artificial Sequence
  Synthetically generated peptide
  VARIANT (1)...(20): Xaa = Any Amino Acid
PGTCGEICAXYAACXTXGXC

SEQ ID NO: 4335 - protein, 20 aa, Artificial Sequence
  Synthetically generated peptide
  VARIANT (1)...(20): Xaa = Any Amino Acid
PGTCGEICAXYAACXTXGCX

SEQ ID NO: 4336 - protein, 19 aa, Artificial Sequence
  Synthetically generated peptide
  VARIANT (1)...(19): Xaa = Any Amino Acid
PGTCGEICAXYAACXTGXC

SEQ ID NO: 4337 - protein, 20 aa, Artificial Sequence
  Synthetically generated peptide
  VARIANT (1)...(20): Xaa = Any Amino Acid
PGTCGEICAXYAACXTGXXC

SEQ ID NO: 4338 - protein, 20 aa, Artificial Sequence
  Synthetically generated peptide
  VARIANT (1)...(20): Xaa = Any Amino Acid
PGTCGEICAXYAACXTGXCX

SEQ ID NO: 4339 - protein, 19 aa, Artificial Sequence
  Synthetically generated peptide
  VARIANT (1)...(19): Xaa = Any Amino Acid
PGTCGEICAXYAACXTGCX

SEQ ID NO: 4340 - protein, 20 aa, Artificial Sequence
  Synthetically generated peptide
  VARIANT (1)...(20): Xaa = Any Amino Acid
PGTCGEICAXYAACXTGCXX

SEQ ID NO: 4341 - protein, 18 aa, Artificial Sequence
  Synthetically generated peptide
  VARIANT (1)...(18): Xaa = Any Amino Acid
PGTCGEICAXYAACTXGC

SEQ ID NO: 4342 - protein, 19 aa, Artificial Sequence
  Synthetically generated peptide
  VARIANT (1)...(19): Xaa = Any Amino Acid
PGTCGEICAXYAACTXXGC

SEQ ID NO: 4343 - protein, 20 aa, Artificial Sequence
  Synthetically generated peptide
  VARIANT (1)...(20): Xaa = Any Amino Acid
PGTCGEICAXYAACTXXXGC

SEQ ID NO: 4344 - protein, 20 aa, Artificial Sequence
  Synthetically generated peptide
  VARIANT (1)...(20): Xaa = Any Amino Acid
PGTCGEICAXYAACTXXGXC

SEQ ID NO: 4345 - protein, 20 aa, Artificial Sequence
  Synthetically generated peptide
  VARIANT (1)...(20): Xaa = Any Amino Acid
PGTCGEICAXYAACTXXGCX

SEQ ID NO: 4346 - protein, 19 aa, Artificial Sequence
  Synthetically generated peptide
  VARIANT (1)...(19): Xaa = Any Amino Acid
PGTCGEICAXYAACTXGXC

SEQ ID NO: 4347 - protein, 20 aa, Artificial Sequence
  Synthetically generated peptide
  VARIANT (1)...(20): Xaa = Any Amino Acid
PGTCGEICAXYAACTXGXXC

SEQ ID NO: 4348 - protein, 20 aa, Artificial Sequence
  Synthetically generated peptide
  VARIANT (1)...(20): Xaa = Any Amino Acid
PGTCGEICAXYAACTXGXCX

SEQ ID NO: 4349 - protein, 19 aa, Artificial Sequence
  Synthetically generated peptide
  VARIANT (1)...(19): Xaa = Any Amino Acid
PGTCGEICAXYAACTXGCX

SEQ ID NO: 4350 - protein, 20 aa, Artificial Sequence
  Synthetically generated peptide
  VARIANT (1)...(20): Xaa = Any Amino Acid
PGTCGEICAXYAACTXGCXX

SEQ ID NO: 4351 - protein, 18 aa, Artificial Sequence
  Synthetically generated peptide
  VARIANT (1)...(18): Xaa = Any Amino Acid
PGTCGEICAXYAACTGXC

SEQ ID NO: 4352 - protein, 19 aa, Artificial Sequence
  Synthetically generated peptide
  VARIANT (1)...(19): Xaa = Any Amino Acid
PGTCGEICAXYAACTGXXC

SEQ ID NO: 4353 - protein, 20 aa, Artificial Sequence
  Synthetically generated peptide
  VARIANT (1)...(20): Xaa = Any Amino Acid
PGTCGEICAXYAACTGXXXC

SEQ ID NO: 4354 - protein, 20 aa, Artificial Sequence
  Synthetically generated peptide
  VARIANT (1)...(20): Xaa = Any Amino Acid
PGTCGEICAXYAACTGXXCX

SEQ ID NO: 4355 - protein, 19 aa, Artificial Sequence
  Synthetically generated peptide
  VARIANT (1)...(19): Xaa = Any Amino Acid
PGTCGEICAXYAACTGXCX

SEQ ID NO: 4356 - protein, 20 aa, Artificial Sequence
  Synthetically generated peptide
  VARIANT (1)...(20): Xaa = Any Amino Acid
PGTCGEICAXYAACTGXCXX

SEQ ID NO: 4357 - protein, 18 aa, Artificial Sequence
  Synthetically generated peptide
  VARIANT (1)...(18): Xaa = Any Amino Acid
PGTCGEICAXYAACTGCX

SEQ ID NO: 4358 - protein, 19 aa, Artificial Sequence
  Synthetically generated peptide
  VARIANT (1)...(19): Xaa = Any Amino Acid
PGTCGEICAXYAACTGCXX

SEQ ID NO: 4359 - protein, 20 aa, Artificial Sequence
  Synthetically generated peptide
  VARIANT (1)...(20): Xaa = Any Amino Acid
PGTCGEICAXYAACTGCXXX

SEQ ID NO: 4360 - protein, 17 aa, Artificial Sequence
  Synthetically generated peptide
  VARIANT (1)...(17): Xaa = Any Amino Acid
PGTCGEICAYXAACTGC

SEQ ID NO: 4361 - protein, 18 aa, Artificial Sequence
  Synthetically generated peptide
  VARIANT (1)...(18): Xaa = Any Amino Acid
PGTCGEICAYXXAACTGC

SEQ ID NO: 4362 - protein, 19 aa, Artificial Sequence
  Synthetically generated peptide
  VARIANT (1)...(19): Xaa = Any Amino Acid
PGTCGEICAYXXXAACTGC

SEQ ID NO: 4363 - protein, 20 aa, Artificial Sequence
  Synthetically generated peptide
  VARIANT (1)...(20): Xaa = Any Amino Acid
PGTCGEICAYXXXXAACTGC

SEQ ID NO: 4364 - protein, 20 aa, Artificial Sequence
  Synthetically generated peptide
  VARIANT (1)...(20): Xaa = Any Amino Acid
PGTCGEICAYXXXAXACTGC

SEQ ID NO: 4365 - protein, 20 aa, Artificial Sequence
  Synthetically generated peptide
  VARIANT (1)...(20): Xaa = Any Amino Acid
PGTCGEICAYXXXAAXCTGC

SEQ ID NO: 4366 - protein, 20 aa, Artificial Sequence
  Synthetically generated peptide
  VARIANT (1)...(20): Xaa = Any Amino Acid
PGTCGEICAYXXXAACXTGC

SEQ ID NO: 4367 - protein, 20 aa, Artificial Sequence
  Synthetically generated peptide
  VARIANT (1)...(20): Xaa = Any Amino Acid
PGTCGEICAYXXXAACTXGC

SEQ ID NO: 4368 - protein, 20 aa, Artificial Sequence
  Synthetically generated peptide
  VARIANT (1)...(20): Xaa = Any Amino Acid
PGTCGEICAYXXXAACTGXC

SEQ ID NO: 4369 - protein, 20 aa, Artificial Sequence
  Synthetically generated peptide
  VARIANT (1)...(20): Xaa = Any Amino Acid
PGTCGEICAYXXXAACTGCX

SEQ ID NO: 4370 - protein, 19 aa, Artificial Sequence
  Synthetically generated peptide
  VARIANT (1)...(19): Xaa = Any Amino Acid
PGTCGEICAYXXAXACTGC

SEQ ID NO: 4371 - protein, 20 aa, Artificial Sequence
  Synthetically generated peptide
  VARIANT (1)...(20): Xaa = Any Amino Acid
PGTCGEICAYXXAXXACTGC

SEQ ID NO: 4372 - protein, 20 aa, Artificial Sequence
  Synthetically generated peptide
  VARIANT (1)...(20): Xaa = Any Amino Acid
PGTCGEICAYXXAXAXCTGC

SEQ ID NO: 4373 - protein, 20 aa, Artificial Sequence
  Synthetically generated peptide
  VARIANT (1)...(20): Xaa = Any Amino Acid
PGTCGEICAYXXAXACXTGC

SEQ ID NO: 4374 - protein, 20 aa, Artificial Sequence
  Synthetically generated peptide
  VARIANT (1)...(20): Xaa = Any Amino Acid
PGTCGEICAYXXAXACTXGC

SEQ ID NO: 4375 - protein, 20 aa, Artificial Sequence
  Synthetically generated peptide
  VARIANT (1)...(20): Xaa = Any Amino Acid
PGTCGEICAYXXAXACTGXC

SEQ ID NO: 4376 - protein, 20 aa, Artificial Sequence
  Synthetically generated peptide
  VARIANT (1)...(20): Xaa = Any Amino Acid
PGTCGEICAYXXAXACTGCX

SEQ ID NO: 4377 - protein, 19 aa, Artificial Sequence
  Synthetically generated peptide
  VARIANT (1)...(19): Xaa = Any Amino Acid
PGTCGEICAYXXAAXCTGC

SEQ ID NO: 4378 - protein, 20 aa, Artificial Sequence
  Synthetically generated peptide
  VARIANT (1)...(20): Xaa = Any Amino Acid
PGTCGEICAYXXAAXXCTGC

SEQ ID NO: 4379 - protein, 20 aa, Artificial Sequence
  Synthetically generated peptide
  VARIANT (1)...(20): Xaa = Any Amino Acid
PGTCGEICAYXXAAXCXTGC

SEQ ID NO: 4380 - protein, 20 aa, Artificial Sequence
  Synthetically generated peptide
  VARIANT (1)...(20): Xaa = Any Amino Acid
PGTCGEICAYXXAAXCTXGC

SEQ ID NO: 4381 - protein, 20 aa, Artificial Sequence
  Synthetically generated peptide
  VARIANT (1)...(20): Xaa = Any Amino Acid
PGTCGEICAYXXAAXCTGXC

SEQ ID NO: 4382 - protein, 20 aa, Artificial Sequence
  Synthetically generated peptide
  VARIANT (1)...(20): Xaa = Any Amino Acid
PGTCGEICAYXXAAXCTGCX

SEQ ID NO: 4383 - protein, 19 aa, Artificial Sequence
  Synthetically generated peptide
  VARIANT (1)...(19): Xaa = Any Amino Acid
PGTCGEICAYXXAACXTGC

SEQ ID NO: 4384 - protein, 20 aa, Artificial Sequence
  Synthetically generated peptide
  VARIANT (1)...(20): Xaa = Any Amino Acid
PGTCGEICAYXXAACXXTGC

SEQ ID NO: 4385 - protein, 20 aa, Artificial Sequence
  Synthetically generated peptide
  VARIANT (1)...(20): Xaa = Any Amino Acid
PGTCGEICAYXXAACXTXGC

SEQ ID NO: 4386 - protein, 20 aa, Artificial Sequence
  Synthetically generated peptide
  VARIANT (1)...(20): Xaa = Any Amino Acid
PGTCGEICAYXXAACXTGXC

SEQ ID NO: 4387 - protein, 20 aa, Artificial Sequence
  Synthetically generated peptide
  VARIANT (1)...(20): Xaa = Any Amino Acid
PGTCGEICAYXXAACXTGCX

SEQ ID NO: 4388 - protein, 19 aa, Artificial Sequence
  Synthetically generated peptide
  VARIANT (1)...(19): Xaa = Any Amino Acid
PGTCGEICAYXXAACTXGC

SEQ ID NO: 4389 - protein, 20 aa, Artificial Sequence
  Synthetically generated peptide
  VARIANT (1)...(20): Xaa = Any Amino Acid
PGTCGEICAYXXAACTXXGC

SEQ ID NO: 4390 - protein, 20 aa, Artificial Sequence
  Synthetically generated peptide
  VARIANT (1)...(20): Xaa = Any Amino Acid
PGTCGEICAYXXAACTXGXC

SEQ ID NO: 4391 - protein, 20 aa, Artificial Sequence
  Synthetically generated peptide
  VARIANT (1)...(20): Xaa = Any Amino Acid
PGTCGEICAYXXAACTXGCX

SEQ ID NO: 4392 - protein, 19 aa, Artificial Sequence
  Synthetically generated peptide
  VARIANT (1)...(19): Xaa = Any Amino Acid
PGTCGEICAYXXAACTGXC

SEQ ID NO: 4393 - protein, 20 aa, Artificial Sequence
  Synthetically generated peptide
  VARIANT (1)...(20): Xaa = Any Amino Acid
PGTCGEICAYXXAACTGXXC

SEQ ID NO: 4394 - protein, 20 aa, Artificial Sequence
  Synthetically generated peptide
  VARIANT (1)...(20): Xaa = Any Amino Acid
PGTCGEICAYXXAACTGXCX

SEQ ID NO: 4395 - protein, 19 aa, Artificial Sequence
  Synthetically generated peptide
  VARIANT (1)...(19): Xaa = Any Amino Acid
PGTCGEICAYXXAACTGCX

SEQ ID NO: 4396 - protein, 20 aa, Artificial Sequence
  Synthetically generated peptide
  VARIANT (1)...(20): Xaa = Any Amino Acid
PGTCGEICAYXXAACTGCXX

SEQ ID NO: 4397 - protein, 18 aa, Artificial Sequence
  Synthetically generated peptide
  VARIANT (1)...(18): Xaa = Any Amino Acid
PGTCGEICAYXAXACTGC

SEQ ID NO: 4398 - protein, 19 aa, Artificial Sequence
  Synthetically generated peptide
  VARIANT (1)...(19): Xaa = Any Amino Acid
PGTCGEICAYXAXXACTGC

SEQ ID NO: 4399 - protein, 20 aa, Artificial Sequence
  Synthetically generated peptide
  VARIANT (1)...(20): Xaa = Any Amino Acid
PGTCGEICAYXAXXXACTGC

SEQ ID NO: 4400 - protein, 20 aa, Artificial Sequence
  Synthetically generated peptide
  VARIANT (1)...(20): Xaa = Any Amino Acid
PGTCGEICAYXAXXAXCTGC

SEQ ID NO: 4401 - protein, 20 aa, Artificial Sequence
  Synthetically generated peptide
  VARIANT (1)...(20): Xaa = Any Amino Acid
PGTCGEICAYXAXXACXTGC

SEQ ID NO: 4402 - protein, 20 aa, Artificial Sequence
  Synthetically generated peptide
  VARIANT (1)...(20): Xaa = Any Amino Acid
PGTCGEICAYXAXXACTXGC

SEQ ID NO: 4403 - protein, 20 aa, Artificial Sequence
  Synthetically generated peptide
  VARIANT (1)...(20): Xaa = Any Amino Acid
PGTCGEICAYXAXXACTGXC

SEQ ID NO: 4404 - protein, 20 aa, Artificial Sequence
  Synthetically generated peptide
  VARIANT (1)...(20): Xaa = Any Amino Acid
PGTCGEICAYXAXXACTGCX

SEQ ID NO: 4405 - protein, 19 aa, Artificial Sequence
  Synthetically generated peptide
  VARIANT (1)...(19): Xaa = Any Amino Acid
PGTCGEICAYXAXAXCTGC

SEQ ID NO: 4406 - protein, 20 aa, Artificial Sequence
  Synthetically generated peptide
  VARIANT (1)...(20): Xaa = Any Amino Acid
PGTCGEICAYXAXAXXCTGC

SEQ ID NO: 4407 - protein, 20 aa, Artificial Sequence
  Synthetically generated peptide
  VARIANT (1)...(20): Xaa = Any Amino Acid
PGTCGEICAYXAXAXCXTGC

SEQ ID NO: 4408 - protein, 20 aa, Artificial Sequence
  Synthetically generated peptide
  VARIANT (1)...(20): Xaa = Any Amino Acid
PGTCGEICAYXAXAXCTXGC

SEQ ID NO: 4409 - protein, 20 aa, Artificial Sequence
  Synthetically generated peptide
  VARIANT (1)...(20): Xaa = Any Amino Acid
PGTCGEICAYXAXAXCTGXC

SEQ ID NO: 4410 - protein, 20 aa, Artificial Sequence
  Synthetically generated peptide
  VARIANT (1)...(20): Xaa = Any Amino Acid
PGTCGEICAYXAXAXCTGCX

SEQ ID NO: 4411 - protein, 19 aa, Artificial Sequence
  Synthetically generated peptide
  VARIANT (1)...(19): Xaa = Any Amino Acid
PGTCGEICAYXAXACXTGC

SEQ ID NO: 4412 - protein, 20 aa, Artificial Sequence
  Synthetically generated peptide
  VARIANT (1)...(20): Xaa = Any Amino Acid
PGTCGEICAYXAXACXXTGC

SEQ ID NO: 4413 - protein, 20 aa, Artificial Sequence
  Synthetically generated peptide
  VARIANT (1)...(20): Xaa = Any Amino Acid
PGTCGEICAYXAXACXTXGC

SEQ ID NO: 4414 - protein, 20 aa, Artificial Sequence
  Synthetically generated peptide
  VARIANT (1)...(20): Xaa = Any Amino Acid
PGTCGEICAYXAXACXTGXC

SEQ ID NO: 4415 - protein, 20 aa, Artificial Sequence
  Synthetically generated peptide
  VARIANT (1)...(20): Xaa = Any Amino Acid
PGTCGEICAYXAXACXTGCX

SEQ ID NO: 4416 - protein, 19 aa, Artificial Sequence
  Synthetically generated peptide
  VARIANT (1)...(19): Xaa = Any Amino Acid
PGTCGEICAYXAXACTXGC

SEQ ID NO: 4417 - protein, 20 aa, Artificial Sequence
  Synthetically generated peptide
  VARIANT (1)...(20): Xaa = Any Amino Acid
PGTCGEICAYXAXACTXXGC

SEQ ID NO: 4418 - protein, 20 aa, Artificial Sequence
  Synthetically generated peptide
  VARIANT (1)...(20): Xaa = Any Amino Acid
PGTCGEICAYXAXACTXGXC

SEQ ID NO: 4419 - protein, 20 aa, Artificial Sequence
  Synthetically generated peptide
  VARIANT (1)...(20): Xaa = Any Amino Acid
PGTCGEICAYXAXACTXGCX

SEQ ID NO: 4420 - protein, 19 aa, Artificial Sequence
  Synthetically generated peptide
  VARIANT (1)...(19): Xaa = Any Amino Acid
PGTCGEICAYXAXACTGXC

SEQ ID NO: 4421 - protein, 20 aa, Artificial Sequence
  Synthetically generated peptide
  VARIANT (1)...(20): Xaa = Any Amino Acid
PGTCGEICAYXAXACTGXXC

SEQ ID NO: 4422 - protein, 20 aa, Artificial Sequence
  Synthetically generated peptide
  VARIANT (1)...(20): Xaa = Any Amino Acid
PGTCGEICAYXAXACTGXCX

SEQ ID NO: 4423 - protein, 19 aa, Artificial Sequence
  Synthetically generated peptide
  VARIANT (1)...(19): Xaa = Any Amino Acid
PGTCGEICAYXAXACTGCX

SEQ ID NO: 4424 - protein, 20 aa, Artificial Sequence
  Synthetically generated peptide
  VARIANT (1)...(20): Xaa = Any Amino Acid
PGTCGEICAYXAXACTGCXX

SEQ ID NO: 4425 - protein, 18 aa, Artificial Sequence
  Synthetically generated peptide
  VARIANT (1)...(18): Xaa = Any Amino Acid
PGTCGEICAYXAAXCTGC

SEQ ID NO: 4426 - protein, 19 aa, Artificial Sequence
  Synthetically generated peptide
  VARIANT (1)...(19): Xaa = Any Amino Acid
PGTCGEICAYXAAXXCTGC

SEQ ID NO: 4427 - protein, 20 aa, Artificial Sequence
  Synthetically generated peptide
  VARIANT (1)...(20): Xaa = Any Amino Acid
PGTCGEICAYXAAXXXCTGC

SEQ ID NO: 4428 - protein, 20 aa, Artificial Sequence
  Synthetically generated peptide
  VARIANT (1)...(20): Xaa = Any Amino Acid
PGTCGEICAYXAAXXCXTGC

SEQ ID NO: 4429 - protein, 20 aa, Artificial Sequence
  Synthetically generated peptide
  VARIANT (1)...(20): Xaa = Any Amino Acid
PGTCGEICAYXAAXXCTXGC

SEQ ID NO: 4430 - protein, 20 aa, Artificial Sequence
  Synthetically generated peptide
  VARIANT (1)...(20): Xaa = Any Amino Acid
PGTCGEICAYXAAXXCTGXC

SEQ ID NO: 4431 - protein, 20 aa, Artificial Sequence
  Synthetically generated peptide
  VARIANT (1)...(20): Xaa = Any Amino Acid
PGTCGEICAYXAAXXCTGCX

SEQ ID NO: 4432 - protein, 19 aa, Artificial Sequence
  Synthetically generated peptide
  VARIANT (1)...(19): Xaa = Any Amino Acid
PGTCGEICAYXAAXCXTGC

SEQ ID NO: 4433 - protein, 20 aa, Artificial Sequence
  Synthetically generated peptide
  VARIANT (1)...(20): Xaa = Any Amino Acid
PGTCGEICAYXAAXCXXTGC

SEQ ID NO: 4434 - protein, 20 aa, Artificial Sequence
  Synthetically generated peptide
  VARIANT (1)...(20): Xaa = Any Amino Acid
PGTCGEICAYXAAXCXTXGC

SEQ ID NO: 4435 - protein, 20 aa, Artificial Sequence
  Synthetically generated peptide
  VARIANT (1)...(20): Xaa = Any Amino Acid
PGTCGEICAYXAAXCXTGXC

SEQ ID NO: 4436 - protein, 20 aa, Artificial Sequence
  Synthetically generated peptide
  VARIANT (1)...(20): Xaa = Any Amino Acid
PGTCGEICAYXAAXCXTGCX

SEQ ID NO: 4437 - protein, 19 aa, Artificial Sequence
  Synthetically generated peptide
  VARIANT (1)...(19): Xaa = Any Amino Acid
PGTCGEICAYXAAXCTXGC

SEQ ID NO: 4438 - protein, 20 aa, Artificial Sequence
  Synthetically generated peptide
  VARIANT (1)...(20): Xaa = Any Amino Acid
PGTCGEICAYXAAXCTXXGC

SEQ ID NO: 4439 - protein, 20 aa, Artificial Sequence
  Synthetically generated peptide
  VARIANT (1)...(20): Xaa = Any Amino Acid
PGTCGEICAYXAAXCTXGXC

SEQ ID NO: 4440 - protein, 20 aa, Artificial Sequence
  Synthetically generated peptide
  VARIANT (1)...(20): Xaa = Any Amino Acid
PGTCGEICAYXAAXCTXGCX

SEQ ID NO: 4441 - protein, 19 aa, Artificial Sequence
  Synthetically generated peptide
  VARIANT (1)...(19): Xaa = Any Amino Acid
PGTCGEICAYXAAXCTGXC

SEQ ID NO: 4442 - protein, 20 aa, Artificial Sequence
  Synthetically generated peptide
  VARIANT (1)...(20): Xaa = Any Amino Acid
PGTCGEICAYXAAXCTGXXC

SEQ ID NO: 4443 - protein, 20 aa, Artificial Sequence
  Synthetically generated peptide
  VARIANT (1)...(20): Xaa = Any Amino Acid
PGTCGEICAYXAAXCTGXCX

SEQ ID NO: 4444 - protein, 19 aa, Artificial Sequence
  Synthetically generated peptide
  VARIANT (1)...(19): Xaa = Any Amino Acid
PGTCGEICAYXAAXCTGCX

SEQ ID NO: 4445 - protein, 20 aa, Artificial Sequence
  Synthetically generated peptide
  VARIANT (1)...(20): Xaa = Any Amino Acid
PGTCGEICAYXAAXCTGCXX

SEQ ID NO: 4446 - protein, 18 aa, Artificial Sequence
  Synthetically generated peptide
  VARIANT (1)...(18): Xaa = Any Amino Acid
PGTCGEICAYXAACXTGC

SEQ ID NO: 4447 - protein, 19 aa, Artificial Sequence
  Synthetically generated peptide
  VARIANT (1)...(19): Xaa = Any Amino Acid
PGTCGEICAYXAACXXTGC

SEQ ID NO: 4448 - protein, 20 aa, Artificial Sequence
  Synthetically generated peptide
  VARIANT (1)...(20): Xaa = Any Amino Acid
PGTCGEICAYXAACXXXTGC

SEQ ID NO: 4449 - protein, 20 aa, Artificial Sequence
  Synthetically generated peptide
  VARIANT (1)...(20): Xaa = Any Amino Acid
PGTCGEICAYXAACXXTXGC

SEQ ID NO: 4450 - protein, 20 aa, Artificial Sequence
  Synthetically generated peptide
  VARIANT (1)...(20): Xaa = Any Amino Acid
PGTCGEICAYXAACXXTGXC

SEQ ID NO: 4451 - protein, 20 aa, Artificial Sequence
  Synthetically generated peptide
  VARIANT (1)...(20): Xaa = Any Amino Acid
PGTCGEICAYXAACXXTGCX

SEQ ID NO: 4452 - protein, 19 aa, Artificial Sequence
  Synthetically generated peptide
  VARIANT (1)...(19): Xaa = Any Amino Acid
PGTCGEICAYXAACXTXGC

SEQ ID NO: 4453 - protein, 20 aa, Artificial Sequence
  Synthetically generated peptide
  VARIANT (1)...(20): Xaa = Any Amino Acid
PGTCGEICAYXAACXTXXGC

SEQ ID NO: 4454 - protein, 20 aa, Artificial Sequence
  Synthetically generated peptide
  VARIANT (1)...(20): Xaa = Any Amino Acid
PGTCGEICAYXAACXTXGXC

SEQ ID NO: 4455 - protein, 20 aa, Artificial Sequence
  Synthetically generated peptide
  VARIANT (1)...(20): Xaa = Any Amino Acid
PGTCGEICAYXAACXTXGCX

SEQ ID NO: 4456 - protein, 19 aa, Artificial Sequence
  Synthetically generated peptide
  VARIANT (1)...(19): Xaa = Any Amino Acid
PGTCGEICAYXAACXTGXC

SEQ ID NO: 4457 - protein, 20 aa, Artificial Sequence
  Synthetically generated peptide
  VARIANT (1)...(20): Xaa = Any Amino Acid
PGTCGEICAYXAACXTGXXC

SEQ ID NO: 4458 - protein, 20 aa, Artificial Sequence
  Synthetically generated peptide
  VARIANT (1)...(20): Xaa = Any Amino Acid
PGTCGEICAYXAACXTGXCX

SEQ ID NO: 4459 - protein, 19 aa, Artificial Sequence
  Synthetically generated peptide
  VARIANT (1)...(19): Xaa = Any Amino Acid
PGTCGEICAYXAACXTGCX

SEQ ID NO: 4460 - protein, 20 aa, Artificial Sequence
  Synthetically generated peptide
  VARIANT (1)...(20): Xaa = Any Amino Acid
PGTCGEICAYXAACXTGCXX

SEQ ID NO: 4461 - protein, 18 aa, Artificial Sequence
  Synthetically generated peptide
  VARIANT (1)...(18): Xaa = Any Amino Acid
PGTCGEICAYXAACTXGC

SEQ ID NO: 4462 - protein, 19 aa, Artificial Sequence
  Synthetically generated peptide
  VARIANT (1)...(19): Xaa = Any Amino Acid
PGTCGEICAYXAACTXXGC

SEQ ID NO: 4463 - protein, 20 aa, Artificial Sequence
  Synthetically generated peptide
  VARIANT (1)...(20): Xaa = Any Amino Acid
PGTCGEICAYXAACTXXXGC

SEQ ID NO: 4464 - protein, 20 aa, Artificial Sequence
  Synthetically generated peptide
  VARIANT (1)...(20): Xaa = Any Amino Acid
PGTCGEICAYXAACTXXGXC

SEQ ID NO: 4465 - protein, 20 aa, Artificial Sequence
  Synthetically generated peptide
  VARIANT (1)...(20): Xaa = Any Amino Acid
PGTCGEICAYXAACTXXGCX

SEQ ID NO: 4466 - protein, 19 aa, Artificial Sequence
  Synthetically generated peptide
  VARIANT (1)...(19): Xaa = Any Amino Acid
PGTCGEICAYXAACTXGXC

SEQ ID NO: 4467 - protein, 20 aa, Artificial Sequence
  Synthetically generated peptide
  VARIANT (1)...(20): Xaa = Any Amino Acid
PGTCGEICAYXAACTXGXXC

SEQ ID NO: 4468 - protein, 20 aa, Artificial Sequence
  Synthetically generated peptide
  VARIANT (1)...(20): Xaa = Any Amino Acid
PGTCGEICAYXAACTXGXCX

SEQ ID NO: 4469 - protein, 19 aa, Artificial Sequence
  Synthetically generated peptide
  VARIANT (1)...(19): Xaa = Any Amino Acid
PGTCGEICAYXAACTXGCX

SEQ ID NO: 4470 - protein, 20 aa, Artificial Sequence
  Synthetically generated peptide
  VARIANT (1)...(20): Xaa = Any Amino Acid
PGTCGEICAYXAACTXGCXX

SEQ ID NO: 4471 - protein, 18 aa, Artificial Sequence
  Synthetically generated peptide
  VARIANT (1)...(18): Xaa = Any Amino Acid
PGTCGEICAYXAACTGXC

SEQ ID NO: 4472 - protein, 19 aa, Artificial Sequence
  Synthetically generated peptide
  VARIANT (1)...(19): Xaa = Any Amino Acid
PGTCGEICAYXAACTGXXC

SEQ ID NO: 4473 - protein, 20 aa, Artificial Sequence
  Synthetically generated peptide
  VARIANT (1)...(20): Xaa = Any Amino Acid
PGTCGEICAYXAACTGXXXC

SEQ ID NO: 4474 - protein, 20 aa, Artificial Sequence
  Synthetically generated peptide
  VARIANT (1)...(20): Xaa = Any Amino Acid
PGTCGEICAYXAACTGXXCX

SEQ ID NO: 4475 - protein, 19 aa, Artificial Sequence
  Synthetically generated peptide
  VARIANT (1)...(19): Xaa = Any Amino Acid
PGTCGEICAYXAACTGXCX

SEQ ID NO: 4476 - protein, 20 aa, Artificial Sequence
  Synthetically generated peptide
  VARIANT (1)...(20): Xaa = Any Amino Acid
PGTCGEICAYXAACTGXCXX

SEQ ID NO: 4477 - protein, 18 aa, Artificial Sequence
  Synthetically generated peptide
  VARIANT (1)...(18): Xaa = Any Amino Acid
PGTCGEICAYXAACTGCX

SEQ ID NO: 4478 - protein, 19 aa, Artificial Sequence
  Synthetically generated peptide
  VARIANT (1)...(19): Xaa = Any Amino Acid
PGTCGEICAYXAACTGCXX

SEQ ID NO: 4479 - protein, 20 aa, Artificial Sequence
  Synthetically generated peptide
  VARIANT (1)...(20): Xaa = Any Amino Acid
PGTCGEICAYXAACTGCXXX

SEQ ID NO: 4480 - protein, 17 aa, Artificial Sequence
  Synthetically generated peptide
  VARIANT (1)...(17): Xaa = Any Amino Acid
PGTCGEICAYAXACTGC

SEQ ID NO: 4481 - protein, 18 aa, Artificial Sequence
  Synthetically generated peptide
  VARIANT (1)...(18): Xaa = Any Amino Acid
PGTCGEICAYAXXACTGC

SEQ ID NO: 4482 - protein, 19 aa, Artificial Sequence
  Synthetically generated peptide
  VARIANT (1)...(19): Xaa = Any Amino Acid
PGTCGEICAYAXXXACTGC

SEQ ID NO: 4483 - protein, 20 aa, Artificial Sequence
  Synthetically generated peptide
  VARIANT (1)...(20): Xaa = Any Amino Acid
PGTCGEICAYAXXXXACTGC

SEQ ID NO: 4484 - protein, 20 aa, Artificial Sequence
  Synthetically generated peptide
  VARIANT (1)...(20): Xaa = Any Amino Acid
PGTCGEICAYAXXXAXCTGC

SEQ ID NO: 4485 - protein, 20 aa, Artificial Sequence
  Synthetically generated peptide
  VARIANT (1)...(20): Xaa = Any Amino Acid
PGTCGEICAYAXXXACXTGC

SEQ ID NO: 4486 - protein, 20 aa, Artificial Sequence
  Synthetically generated peptide
  VARIANT (1)...(20): Xaa = Any Amino Acid
PGTCGEICAYAXXXACTXGC

SEQ ID NO: 4487 - protein, 20 aa, Artificial Sequence
  Synthetically generated peptide
  VARIANT (1)...(20): Xaa = Any Amino Acid
PGTCGEICAYAXXXACTGXC

SEQ ID NO: 4488 - protein, 20 aa, Artificial Sequence
  Synthetically generated peptide
  VARIANT (1)...(20): Xaa = Any Amino Acid
PGTCGEICAYAXXXACTGCX

SEQ ID NO: 4489 - protein, 19 aa, Artificial Sequence
  Synthetically generated peptide
  VARIANT (1)...(19): Xaa = Any Amino Acid
PGTCGEICAYAXXAXCTGC

SEQ ID NO: 4490 - protein, 20 aa, Artificial Sequence
  Synthetically generated peptide
  VARIANT (1)...(20): Xaa = Any Amino Acid
PGTCGEICAYAXXAXXCTGC

SEQ ID NO: 4491 - protein, 20 aa, Artificial Sequence
  Synthetically generated peptide
  VARIANT (1)...(20): Xaa = Any Amino Acid
PGTCGEICAYAXXAXCXTGC

SEQ ID NO: 4492 - protein, 20 aa, Artificial Sequence
  Synthetically generated peptide
  VARIANT (1)...(20): Xaa = Any Amino Acid
PGTCGEICAYAXXAXCTXGC

SEQ ID NO: 4493 - protein, 20 aa, Artificial Sequence
  Synthetically generated peptide
  VARIANT (1)...(20): Xaa = Any Amino Acid
PGTCGEICAYAXXAXCTGXC

SEQ ID NO: 4494 - protein, 20 aa, Artificial Sequence
  Synthetically generated peptide
  VARIANT (1)...(20): Xaa = Any Amino Acid
PGTCGEICAYAXXAXCTGCX

SEQ ID NO: 4495 - protein, 19 aa, Artificial Sequence
  Synthetically generated peptide
  VARIANT (1)...(19): Xaa = Any Amino Acid
PGTCGEICAYAXXACXTGC

SEQ ID NO: 4496 - protein, 20 aa, Artificial Sequence
  Synthetically generated peptide
  VARIANT (1)...(20): Xaa = Any Amino Acid
PGTCGEICAYAXXACXXTGC

SEQ ID NO: 4497 - protein, 20 aa, Artificial Sequence
  Synthetically generated peptide
  VARIANT (1)...(20): Xaa = Any Amino Acid
PGTCGEICAYAXXACXTXGC

SEQ ID NO: 4498 - protein, 20 aa, Artificial Sequence
  Synthetically generated peptide
  VARIANT (1)...(20): Xaa = Any Amino Acid
PGTCGEICAYAXXACXTGXC

SEQ ID NO: 4499 - protein, 20 aa, Artificial Sequence
  Synthetically generated peptide
  VARIANT (1)...(20): Xaa = Any Amino Acid
PGTCGEICAYAXXACXTGCX

SEQ ID NO: 4500 - protein, 19 aa, Artificial Sequence
  Synthetically generated peptide
  VARIANT (1)...(19): Xaa = Any Amino Acid
PGTCGEICAYAXXACTXGC

SEQ ID NO: 4501 - protein, 20 aa, Artificial Sequence
  Synthetically generated peptide
  VARIANT (1)...(20): Xaa = Any Amino Acid
PGTCGEICAYAXXACTXXGC

SEQ ID NO: 4502 - protein, 20 aa, Artificial Sequence
  Synthetically generated peptide
  VARIANT (1)...(20): Xaa = Any Amino Acid
PGTCGEICAYAXXACTXGXC

SEQ ID NO: 4503 - protein, 20 aa, Artificial Sequence
  Synthetically generated peptide
  VARIANT (1)...(20): Xaa = Any Amino Acid
PGTCGEICAYAXXACTXGCX

SEQ ID NO: 4504 - protein, 19 aa, Artificial Sequence
  Synthetically generated peptide
  VARIANT (1)...(19): Xaa = Any Amino Acid
PGTCGEICAYAXXACTGXC

SEQ ID NO: 4505 - protein, 20 aa, Artificial Sequence
  Synthetically generated peptide
  VARIANT (1)...(20): Xaa = Any Amino Acid
PGTCGEICAYAXXACTGXXC

SEQ ID NO: 4506 - protein, 20 aa, Artificial Sequence
  Synthetically generated peptide
  VARIANT (1)...(20): Xaa = Any Amino Acid
PGTCGEICAYAXXACTGXCX

SEQ ID NO: 4507 - protein, 19 aa, Artificial Sequence
  Synthetically generated peptide
  VARIANT (1)...(19): Xaa = Any Amino Acid
PGTCGEICAYAXXACTGCX

SEQ ID NO: 4508 - protein, 20 aa, Artificial Sequence
  Synthetically generated peptide
  VARIANT (1)...(20): Xaa = Any Amino Acid
PGTCGEICAYAXXACTGCXX

SEQ ID NO: 4509 - protein, 18 aa, Artificial Sequence
  Synthetically generated peptide
  VARIANT (1)...(18): Xaa = Any Amino Acid
PGTCGEICAYAXAXCTGC

SEQ ID NO: 4510 - protein, 19 aa, Artificial Sequence
  Synthetically generated peptide
  VARIANT (1)...(19): Xaa = Any Amino Acid
PGTCGEICAYAXAXXCTGC

SEQ ID NO: 4511 - protein, 20 aa, Artificial Sequence
  Synthetically generated peptide
  VARIANT (1)...(20): Xaa = Any Amino Acid
PGTCGEICAYAXAXXXCTGC

SEQ ID NO: 4512 - protein, 20 aa, Artificial Sequence
  Synthetically generated peptide
  VARIANT (1)...(20): Xaa = Any Amino Acid
PGTCGEICAYAXAXXCXTGC

SEQ ID NO: 4513 - protein, 20 aa, Artificial Sequence
  Synthetically generated peptide
  VARIANT (1)...(20): Xaa = Any Amino Acid
PGTCGEICAYAXAXXCTXGC

SEQ ID NO: 4514 - protein, 20 aa, Artificial Sequence
  Synthetically generated peptide
  VARIANT (1)...(20): Xaa = Any Amino Acid
PGTCGEICAYAXAXXCTGXC

SEQ ID NO: 4515 - protein, 20 aa, Artificial Sequence
  Synthetically generated peptide
  VARIANT (1)...(20): Xaa = Any Amino Acid
PGTCGEICAYAXAXXCTGCX

SEQ ID NO: 4516 - protein, 19 aa, Artificial Sequence
  Synthetically generated peptide
  VARIANT (1)...(19): Xaa = Any Amino Acid
PGTCGEICAYAXAXCXTGC

SEQ ID NO: 4517 - protein, 20 aa, Artificial Sequence
  Synthetically generated peptide
  VARIANT (1)...(20): Xaa = Any Amino Acid
PGTCGEICAYAXAXCXXTGC

SEQ ID NO: 4518 - protein, 20 aa, Artificial Sequence
  Synthetically generated peptide
  VARIANT (1)...(20): Xaa = Any Amino Acid
PGTCGEICAYAXAXCXTXGC

SEQ ID NO: 4519 - protein, 20 aa, Artificial Sequence
  Synthetically generated peptide
  VARIANT (1)...(20): Xaa = Any Amino Acid
PGTCGEICAYAXAXCXTGXC

SEQ ID NO: 4520 - protein, 20 aa, Artificial Sequence
  Synthetically generated peptide
  VARIANT (1)...(20): Xaa = Any Amino Acid
PGTCGEICAYAXAXCXTGCX

SEQ ID NO: 4521 - protein, 19 aa, Artificial Sequence
  Synthetically generated peptide
  VARIANT (1)...(19): Xaa = Any Amino Acid
PGTCGEICAYAXAXCTXGC

SEQ ID NO: 4522 - protein, 20 aa, Artificial Sequence
  Synthetically generated peptide
  VARIANT (1)...(20): Xaa = Any Amino Acid
PGTCGEICAYAXAXCTXXGC

SEQ ID NO: 4523 - protein, 20 aa, Artificial Sequence
  Synthetically generated peptide
  VARIANT (1)...(20): Xaa = Any Amino Acid
PGTCGEICAYAXAXCTXGXC

SEQ ID NO: 4524 - protein, 20 aa, Artificial Sequence
  Synthetically generated peptide
  VARIANT (1)...(20): Xaa = Any Amino Acid
PGTCGEICAYAXAXCTXGCX

SEQ ID NO: 4525 - protein, 19 aa, Artificial Sequence
  Synthetically generated peptide
  VARIANT (1)...(19): Xaa = Any Amino Acid
PGTCGEICAYAXAXCTGXC

SEQ ID NO: 4526 - protein, 20 aa, Artificial Sequence
  Synthetically generated peptide
  VARIANT (1)...(20): Xaa = Any Amino Acid
PGTCGEICAYAXAXCTGXXC

SEQ ID NO: 4527 - protein, 20 aa, Artificial Sequence
  Synthetically generated peptide
  VARIANT (1)...(20): Xaa = Any Amino Acid
PGTCGEICAYAXAXCTGXCX

SEQ ID NO: 4528 - protein, 19 aa, Artificial Sequence
  Synthetically generated peptide
  VARIANT (1)...(19): Xaa = Any Amino Acid
PGTCGEICAYAXAXCTGCX

SEQ ID NO: 4529 - protein, 20 aa, Artificial Sequence
  Synthetically generated peptide
  VARIANT (1)...(20): Xaa = Any Amino Acid
PGTCGEICAYAXAXCTGCXX

SEQ ID NO: 4530 - protein, 18 aa, Artificial Sequence
  Synthetically generated peptide
  VARIANT (1)...(18): Xaa = Any Amino Acid
PGTCGEICAYAXACXTGC

SEQ ID NO: 4531 - protein, 19 aa, Artificial Sequence
  Synthetically generated peptide
  VARIANT (1)...(19): Xaa = Any Amino Acid
PGTCGEICAYAXACXXTGC

SEQ ID NO: 4532 - protein, 20 aa, Artificial Sequence
  Synthetically generated peptide
  VARIANT (1)...(20): Xaa = Any Amino Acid
PGTCGEICAYAXACXXXTGC

SEQ ID NO: 4533 - protein, 20 aa, Artificial Sequence
  Synthetically generated peptide
  VARIANT (1)...(20): Xaa = Any Amino Acid
PGTCGEICAYAXACXXTXGC

SEQ ID NO: 4534 - protein, 20 aa, Artificial Sequence
  Synthetically generated peptide
  VARIANT (1)...(20): Xaa = Any Amino Acid
PGTCGEICAYAXACXXTGXC

SEQ ID NO: 4535 - protein, 20 aa, Artificial Sequence
  Synthetically generated peptide
  VARIANT (1)...(20): Xaa = Any Amino Acid
PGTCGEICAYAXACXXTGCX

SEQ ID NO: 4536 - protein, 19 aa, Artificial Sequence
  Synthetically generated peptide
  VARIANT (1)...(19): Xaa = Any Amino Acid
PGTCGEICAYAXACXTXGC

SEQ ID NO: 4537 - protein, 20 aa, Artificial Sequence
  Synthetically generated peptide
  VARIANT (1)...(20): Xaa = Any Amino Acid
PGTCGEICAYAXACXTXXGC

SEQ ID NO: 4538 - protein, 20 aa, Artificial Sequence
  Synthetically generated peptide
  VARIANT (1)...(20): Xaa = Any Amino Acid
PGTCGEICAYAXACXTXGXC

SEQ ID NO: 4539 - protein, 20 aa, Artificial Sequence
  Synthetically generated peptide
  VARIANT (1)...(20): Xaa = Any Amino Acid
PGTCGEICAYAXACXTXGCX

SEQ ID NO: 4540 - protein, 19 aa, Artificial Sequence
  Synthetically generated peptide
  VARIANT (1)...(19): Xaa = Any Amino Acid
PGTCGEICAYAXACXTGXC

SEQ ID NO: 4541 - protein, 20 aa, Artificial Sequence
  Synthetically generated peptide
  VARIANT (1)...(20): Xaa = Any Amino Acid
PGTCGEICAYAXACXTGXXC

SEQ ID NO: 4542 - protein, 20 aa, Artificial Sequence
  Synthetically generated peptide
  VARIANT (1)...(20): Xaa = Any Amino Acid
PGTCGEICAYAXACXTGXCX

SEQ ID NO: 4543 - protein, 19 aa, Artificial Sequence
  Synthetically generated peptide
  VARIANT (1)...(19): Xaa = Any Amino Acid
PGTCGEICAYAXACXTGCX

SEQ ID NO: 4544 - protein, 20 aa, Artificial Sequence
  Synthetically generated peptide
  VARIANT (1)...(20): Xaa = Any Amino Acid
PGTCGEICAYAXACXTGCXX

SEQ ID NO: 4545 - protein, 18 aa, Artificial Sequence
  Synthetically generated peptide
  VARIANT (1)...(18): Xaa = Any Amino Acid
PGTCGEICAYAXACTXGC

SEQ ID NO: 4546 - protein, 19 aa, Artificial Sequence
  Synthetically generated peptide
  VARIANT (1)...(19): Xaa = Any Amino Acid
PGTCGEICAYAXACTXXGC

SEQ ID NO: 4547 - protein, 20 aa, Artificial Sequence
  Synthetically generated peptide
  VARIANT (1)...(20): Xaa = Any Amino Acid
PGTCGEICAYAXACTXXXGC

SEQ ID NO: 4548 - protein, 20 aa, Artificial Sequence
  Synthetically generated peptide
  VARIANT (1)...(20): Xaa = Any Amino Acid
PGTCGEICAYAXACTXXGXC

SEQ ID NO: 4549 - protein, 20 aa, Artificial Sequence
  Synthetically generated peptide
  VARIANT (1)...(20): Xaa = Any Amino Acid
PGTCGEICAYAXACTXXGCX

SEQ ID NO: 4550 - protein, 19 aa, Artificial Sequence
  Synthetically generated peptide
  VARIANT (1)...(19): Xaa = Any Amino Acid
PGTCGEICAYAXACTXGXC

SEQ ID NO: 4551 - protein, 20 aa, Artificial Sequence
  Synthetically generated peptide
  VARIANT (1)...(20): Xaa = Any Amino Acid
PGTCGEICAYAXACTXGXXC

SEQ ID NO: 4552 - protein, 20 aa, Artificial Sequence
  Synthetically generated peptide
  VARIANT (1)...(20): Xaa = Any Amino Acid
PGTCGEICAYAXACTXGXCX

SEQ ID NO: 4553 - protein, 19 aa, Artificial Sequence
  Synthetically generated peptide
  VARIANT (1)...(19): Xaa = Any Amino Acid
PGTCGEICAYAXACTXGCX

SEQ ID NO: 4554 - protein, 20 aa, Artificial Sequence
  Synthetically generated peptide
  VARIANT (1)...(20): Xaa = Any Amino Acid
PGTCGEICAYAXACTXGCXX

SEQ ID NO: 4555 - protein, 18 aa, Artificial Sequence
  Synthetically generated peptide
  VARIANT (1)...(18): Xaa = Any Amino Acid
PGTCGEICAYAXACTGXC

SEQ ID NO: 4556 - protein, 19 aa, Artificial Sequence
  Synthetically generated peptide
  VARIANT (1)...(19): Xaa = Any Amino Acid
PGTCGEICAYAXACTGXXC

SEQ ID NO: 4557 - protein, 20 aa, Artificial Sequence
  Synthetically generated peptide
  VARIANT (1)...(20): Xaa = Any Amino Acid
PGTCGEICAYAXACTGXXXC

SEQ ID NO: 4558 - protein, 20 aa, Artificial Sequence
  Synthetically generated peptide
  VARIANT (1)...(20): Xaa = Any Amino Acid
PGTCGEICAYAXACTGXXCX

SEQ ID NO: 4559 - protein, 19 aa, Artificial Sequence
  Synthetically generated peptide
  VARIANT (1)...(19): Xaa = Any Amino Acid
PGTCGEICAYAXACTGXCX

SEQ ID NO: 4560 - protein, 20 aa, Artificial Sequence
  Synthetically generated peptide
  VARIANT (1)...(20): Xaa = Any Amino Acid
PGTCGEICAYAXACTGXCXX

SEQ ID NO: 4561 - protein, 18 aa, Artificial Sequence
  Synthetically generated peptide
  VARIANT (1)...(18): Xaa = Any Amino Acid
PGTCGEICAYAXACTGCX

SEQ ID NO: 4562 - protein, 19 aa, Artificial Sequence
  Synthetically generated peptide
  VARIANT (1)...(19): Xaa = Any Amino Acid
PGTCGEICAYAXACTGCXX

SEQ ID NO: 4563 - protein, 20 aa, Artificial Sequence
  Synthetically generated peptide
  VARIANT (1)...(20): Xaa = Any Amino Acid
PGTCGEICAYAXACTGCXXX

SEQ ID NO: 4564 - protein, 17 aa, Artificial Sequence
  Synthetically generated peptide
  VARIANT (1)...(17): Xaa = Any Amino Acid
PGTCGEICAYAAXCTGC

SEQ ID NO: 4565 - protein, 18 aa, Artificial Sequence
  Synthetically generated peptide
  VARIANT (1)...(18): Xaa = Any Amino Acid
PGTCGEICAYAAXXCTGC

SEQ ID NO: 4566 - protein, 19 aa, Artificial Sequence
  Synthetically generated peptide
  VARIANT (1)...(19): Xaa = Any Amino Acid
PGTCGEICAYAAXXXCTGC

SEQ ID NO: 4567 - protein, 20 aa, Artificial Sequence
  Synthetically generated peptide
  VARIANT (1)...(20): Xaa = Any Amino Acid
PGTCGEICAYAAXXXXCTGC

SEQ ID NO: 4568 - protein, 20 aa, Artificial Sequence
  Synthetically generated peptide
  VARIANT (1)...(20): Xaa = Any Amino Acid
PGTCGEICAYAAXXXCXTGC

SEQ ID NO: 4569 - protein, 20 aa, Artificial Sequence
  Synthetically generated peptide
  VARIANT (1)...(20): Xaa = Any Amino Acid
PGTCGEICAYAAXXXCTXGC

SEQ ID NO: 4570 - protein, 20 aa, Artificial Sequence
  Synthetically generated peptide
  VARIANT (1)...(20): Xaa = Any Amino Acid
PGTCGEICAYAAXXXCTGXC

SEQ ID NO: 4571 - protein, 20 aa, Artificial Sequence
  Synthetically generated peptide
  VARIANT (1)...(20): Xaa = Any Amino Acid
PGTCGEICAYAAXXXCTGCX

SEQ ID NO: 4572 - protein, 19 aa, Artificial Sequence
  Synthetically generated peptide
  VARIANT (1)...(19): Xaa = Any Amino Acid
PGTCGEICAYAAXXCXTGC

SEQ ID NO: 4573 - protein, 20 aa, Artificial Sequence
  Synthetically generated peptide
  VARIANT (1)...(20): Xaa = Any Amino Acid
PGTCGEICAYAAXXCXXTGC

SEQ ID NO: 4574 - protein, 20 aa, Artificial Sequence
  Synthetically generated peptide
  VARIANT (1)...(20): Xaa = Any Amino Acid
PGTCGEICAYAAXXCXTXGC

SEQ ID NO: 4575 - protein, 20 aa, Artificial Sequence
  Synthetically generated peptide
  VARIANT (1)...(20): Xaa = Any Amino Acid
PGTCGEICAYAAXXCXTGXC

SEQ ID NO: 4576 - protein, 20 aa, Artificial Sequence
  Synthetically generated peptide
  VARIANT (1)...(20): Xaa = Any Amino Acid
PGTCGEICAYAAXXCXTGCX

SEQ ID NO: 4577 - protein, 19 aa, Artificial Sequence
  Synthetically generated peptide
  VARIANT (1)...(19): Xaa = Any Amino Acid
PGTCGEICAYAAXXCTXGC

SEQ ID NO: 4578 - protein, 20 aa, Artificial Sequence
  Synthetically generated peptide
  VARIANT (1)...(20): Xaa = Any Amino Acid
PGTCGEICAYAAXXCTXXGC

SEQ ID NO: 4579 - protein, 20 aa, Artificial Sequence
  Synthetically generated peptide
  VARIANT (1)...(20): Xaa = Any Amino Acid
PGTCGEICAYAAXXCTXGXC

SEQ ID NO: 4580 - protein, 20 aa, Artificial Sequence
  Synthetically generated peptide
  VARIANT (1)...(20): Xaa = Any Amino Acid
PGTCGEICAYAAXXCTXGCX

SEQ ID NO: 4581 - protein, 19 aa, Artificial Sequence
  Synthetically generated peptide
  VARIANT (1)...(19): Xaa = Any Amino Acid
PGTCGEICAYAAXXCTGXC

SEQ ID NO: 4582 - protein, 20 aa, Artificial Sequence
  Synthetically generated peptide
  VARIANT (1)...(20): Xaa = Any Amino Acid
PGTCGEICAYAAXXCTGXXC

SEQ ID NO: 4583 - protein, 20 aa, Artificial Sequence
  Synthetically generated peptide
  VARIANT (1)...(20): Xaa = Any Amino Acid
PGTCGEICAYAAXXCTGXCX

SEQ ID NO: 4584 - protein, 19 aa, Artificial Sequence
  Synthetically generated peptide
  VARIANT (1)...(19): Xaa = Any Amino Acid
PGTCGEICAYAAXXCTGCX

SEQ ID NO: 4585 - protein, 20 aa, Artificial Sequence
  Synthetically generated peptide
  VARIANT (1)...(20): Xaa = Any Amino Acid
PGTCGEICAYAAXXCTGCXX

SEQ ID NO: 4586 - protein, 18 aa, Artificial Sequence
  Synthetically generated peptide
  VARIANT (1)...(18): Xaa = Any Amino Acid
PGTCGEICAYAAXCXTGC

SEQ ID NO: 4587 - protein, 19 aa, Artificial Sequence
  Synthetically generated peptide
  VARIANT (1)...(19): Xaa = Any Amino Acid
PGTCGEICAYAAXCXXTGC

SEQ ID NO: 4588 - protein, 20 aa, Artificial Sequence
  Synthetically generated peptide
  VARIANT (1)...(20): Xaa = Any Amino Acid
PGTCGEICAYAAXCXXXTGC

SEQ ID NO: 4589 - protein, 20 aa, Artificial Sequence
  Synthetically generated peptide
  VARIANT (1)...(20): Xaa = Any Amino Acid
PGTCGEICAYAAXCXXTXGC

SEQ ID NO: 4590 - protein, 20 aa, Artificial Sequence
  Synthetically generated peptide
  VARIANT (1)...(20): Xaa = Any Amino Acid
PGTCGEICAYAAXCXXTGXC

SEQ ID NO: 4591 - protein, 20 aa, Artificial Sequence
  Synthetically generated peptide
  VARIANT (1)...(20): Xaa = Any Amino Acid
PGTCGEICAYAAXCXXTGCX

SEQ ID NO: 4592 - protein, 19 aa, Artificial Sequence
  Synthetically generated peptide
  VARIANT (1)...(19): Xaa = Any Amino Acid
PGTCGEICAYAAXCXTXGC

SEQ ID NO: 4593 - protein, 20 aa, Artificial Sequence
  Synthetically generated peptide
  VARIANT (1)...(20): Xaa = Any Amino Acid
PGTCGEICAYAAXCXTXXGC

SEQ ID NO: 4594 - protein, 20 aa, Artificial Sequence
  Synthetically generated peptide
  VARIANT (1)...(20): Xaa = Any Amino Acid
PGTCGEICAYAAXCXTXGXC

SEQ ID NO: 4595 - protein, 20 aa, Artificial Sequence
  Synthetically generated peptide
  VARIANT (1)...(20): Xaa = Any Amino Acid
PGTCGEICAYAAXCXTXGCX

SEQ ID NO: 4596 - protein, 19 aa, Artificial Sequence
  Synthetically generated peptide
  VARIANT (1)...(19): Xaa = Any Amino Acid
PGTCGEICAYAAXCXTGXC

SEQ ID NO: 4597 - protein, 20 aa, Artificial Sequence
  Synthetically generated peptide
  VARIANT (1)...(20): Xaa = Any Amino Acid
PGTCGEICAYAAXCXTGXXC

SEQ ID NO: 4598 - protein, 20 aa, Artificial Sequence
  Synthetically generated peptide
  VARIANT (1)...(20): Xaa = Any Amino Acid
PGTCGEICAYAAXCXTGXCX

SEQ ID NO: 4599 - protein, 19 aa, Artificial Sequence
  Synthetically generated peptide
  VARIANT (1)...(19): Xaa = Any Amino Acid
PGTCGEICAYAAXCXTGCX

SEQ ID NO: 4600 - protein, 20 aa, Artificial Sequence
  Synthetically generated peptide
  VARIANT (1)...(20): Xaa = Any Amino Acid
PGTCGEICAYAAXCXTGCXX

SEQ ID NO: 4601 - protein, 18 aa, Artificial Sequence
  Synthetically generated peptide
  VARIANT (1)...(18): Xaa = Any Amino Acid
PGTCGEICAYAAXCTXGC

SEQ ID NO: 4602 - protein, 19 aa, Artificial Sequence
  Synthetically generated peptide
  VARIANT (1)...(19): Xaa = Any Amino Acid
PGTCGEICAYAAXCTXXGC

SEQ ID NO: 4603 - protein, 20 aa, Artificial Sequence
  Synthetically generated peptide
  VARIANT (1)...(20): Xaa = Any Amino Acid
PGTCGEICAYAAXCTXXXGC

SEQ ID NO: 4604 - protein, 20 aa, Artificial Sequence
  Synthetically generated peptide
  VARIANT (1)...(20): Xaa = Any Amino Acid
PGTCGEICAYAAXCTXXGXC

SEQ ID NO: 4605 - protein, 20 aa, Artificial Sequence
  Synthetically generated peptide
  VARIANT (1)...(20): Xaa = Any Amino Acid
PGTCGEICAYAAXCTXXGCX

SEQ ID NO: 4606 - protein, 19 aa, Artificial Sequence
  Synthetically generated peptide
  VARIANT (1)...(19): Xaa = Any Amino Acid
PGTCGEICAYAAXCTXGXC

SEQ ID NO: 4607 - protein, 20 aa, Artificial Sequence
  Synthetically generated peptide
  VARIANT (1)...(20): Xaa = Any Amino Acid
PGTCGEICAYAAXCTXGXXC

SEQ ID NO: 4608 - protein, 20 aa, Artificial Sequence
  Synthetically generated peptide
  VARIANT (1)...(20): Xaa = Any Amino Acid
PGTCGEICAYAAXCTXGXCX

SEQ ID NO: 4609 - protein, 19 aa, Artificial Sequence
  Synthetically generated peptide
  VARIANT (1)...(19): Xaa = Any Amino Acid
PGTCGEICAYAAXCTXGCX

SEQ ID NO: 4610 - protein, 20 aa, Artificial Sequence
  Synthetically generated peptide
  VARIANT (1)...(20): Xaa = Any Amino Acid
PGTCGEICAYAAXCTXGCXX

SEQ ID NO: 4611 - protein, 18 aa, Artificial Sequence
  Synthetically generated peptide
  VARIANT (1)...(18): Xaa = Any Amino Acid
PGTCGEICAYAAXCTGXC

SEQ ID NO: 4612 - protein, 19 aa, Artificial Sequence
  Synthetically generated peptide
  VARIANT (1)...(19): Xaa = Any Amino Acid
PGTCGEICAYAAXCTGXXC

SEQ ID NO: 4613 - protein, 20 aa, Artificial Sequence
  Synthetically generated peptide
  VARIANT (1)...(20): Xaa = Any Amino Acid
PGTCGEICAYAAXCTGXXXC

SEQ ID NO: 4614 - protein, 20 aa, Artificial Sequence
  Synthetically generated peptide
  VARIANT (1)...(20): Xaa = Any Amino Acid
PGTCGEICAYAAXCTGXXCX

SEQ ID NO: 4615 - protein, 19 aa, Artificial Sequence
  Synthetically generated peptide
  VARIANT (1)...(19): Xaa = Any Amino Acid
PGTCGEICAYAAXCTGXCX

SEQ ID NO: 4616 - protein, 20 aa, Artificial Sequence
  Synthetically generated peptide
  VARIANT (1)...(20): Xaa = Any Amino Acid
PGTCGEICAYAAXCTGXCXX

SEQ ID NO: 4617 - protein, 18 aa, Artificial Sequence
  Synthetically generated peptide
  VARIANT (1)...(18): Xaa = Any Amino Acid
PGTCGEICAYAAXCTGCX

SEQ ID NO: 4618 - protein, 19 aa, Artificial Sequence
  Synthetically generated peptide
  VARIANT (1)...(19): Xaa = Any Amino Acid
PGTCGEICAYAAXCTGCXX

SEQ ID NO: 4619 - protein, 20 aa, Artificial Sequence
  Synthetically generated peptide
  VARIANT (1)...(20): Xaa = Any Amino Acid
PGTCGEICAYAAXCTGCXXX

SEQ ID NO: 4620 - protein, 17 aa, Artificial Sequence
  Synthetically generated peptide
  VARIANT (1)...(17): Xaa = Any Amino Acid
PGTCGEICAYAACXTGC

SEQ ID NO: 4621 - protein, 18 aa, Artificial Sequence
  Synthetically generated peptide
  VARIANT (1)...(18): Xaa = Any Amino Acid
PGTCGEICAYAACXXTGC

SEQ ID NO: 4622 - protein, 19 aa, Artificial Sequence
  Synthetically generated peptide
  VARIANT (1)...(19): Xaa = Any Amino Acid
PGTCGEICAYAACXXXTGC

SEQ ID NO: 4623 - protein, 20 aa, Artificial Sequence
  Synthetically generated peptide
  VARIANT (1)...(20): Xaa = Any Amino Acid
PGTCGEICAYAACXXXXTGC

SEQ ID NO: 4624 - protein, 20 aa, Artificial Sequence
  Synthetically generated peptide
  VARIANT (1)...(20): Xaa = Any Amino Acid
PGTCGEICAYAACXXXTXGC

SEQ ID NO: 4625 - protein, 20 aa, Artificial Sequence
  Synthetically generated peptide
  VARIANT (1)...(20): Xaa = Any Amino Acid
PGTCGEICAYAACXXXTGXC

SEQ ID NO: 4626 - protein, 20 aa, Artificial Sequence
  Synthetically generated peptide
  VARIANT (1)...(20): Xaa = Any Amino Acid
PGTCGEICAYAACXXXTGCX

SEQ ID NO: 4627 - protein, 19 aa, Artificial Sequence
  Synthetically generated peptide
  VARIANT (1)...(19): Xaa = Any Amino Acid
PGTCGEICAYAACXXTXGC

SEQ ID NO: 4628 - protein, 20 aa, Artificial Sequence
  Synthetically generated peptide
  VARIANT (1)...(20): Xaa = Any Amino Acid
PGTCGEICAYAACXXTXXGC

SEQ ID NO: 4629 - protein, 20 aa, Artificial Sequence
  Synthetically generated peptide
  VARIANT (1)...(20): Xaa = Any Amino Acid
PGTCGEICAYAACXXTXGXC

SEQ ID NO: 4630 - protein, 20 aa, Artificial Sequence
  Synthetically generated peptide
  VARIANT (1)...(20): Xaa = Any Amino Acid
PGTCGEICAYAACXXTXGCX

SEQ ID NO: 4631 - protein, 19 aa, Artificial Sequence
  Synthetically generated peptide
  VARIANT (1)...(19): Xaa = Any Amino Acid
PGTCGEICAYAACXXTGXC

SEQ ID NO: 4632 - protein, 20 aa, Artificial Sequence
  Synthetically generated peptide
  VARIANT (1)...(20): Xaa = Any Amino Acid
PGTCGEICAYAACXXTGXXC

SEQ ID NO: 4633 - protein, 20 aa, Artificial Sequence
  Synthetically generated peptide
  VARIANT (1)...(20): Xaa = Any Amino Acid
PGTCGEICAYAACXXTGXCX

SEQ ID NO: 4634 - protein, 19 aa, Artificial Sequence
  Synthetically generated peptide
  VARIANT (1)...(19): Xaa = Any Amino Acid
PGTCGEICAYAACXXTGCX

SEQ ID NO: 4635 - protein, 20 aa, Artificial Sequence
  Synthetically generated peptide
  VARIANT (1)...(20): Xaa = Any Amino Acid
PGTCGEICAYAACXXTGCXX

SEQ ID NO: 4636 - protein, 18 aa, Artificial Sequence
  Synthetically generated peptide
  VARIANT (1)...(18): Xaa = Any Amino Acid
PGTCGEICAYAACXTXGC

SEQ ID NO: 4637 - protein, 19 aa, Artificial Sequence
  Synthetically generated peptide
  VARIANT (1)...(19): Xaa = Any Amino Acid
PGTCGEICAYAACXTXXGC

SEQ ID NO: 4638 - protein, 20 aa, Artificial Sequence
  Synthetically generated peptide
  VARIANT (1)...(20): Xaa = Any Amino Acid
PGTCGEICAYAACXTXXXGC

SEQ ID NO: 4639 - protein, 20 aa, Artificial Sequence
  Synthetically generated peptide
  VARIANT (1)...(20): Xaa = Any Amino Acid
PGTCGEICAYAACXTXXGXC

SEQ ID NO: 4640 - protein, 20 aa, Artificial Sequence
  Synthetically generated peptide
  VARIANT (1)...(20): Xaa = Any Amino Acid
PGTCGEICAYAACXTXXGCX

SEQ ID NO: 4641 - protein, 19 aa, Artificial Sequence
  Synthetically generated peptide
  VARIANT (1)...(19): Xaa = Any Amino Acid
PGTCGEICAYAACXTXGXC

SEQ ID NO: 4642 - protein, 20 aa, Artificial Sequence
  Synthetically generated peptide
  VARIANT (1)...(20): Xaa = Any Amino Acid
PGTCGEICAYAACXTXGXXC

SEQ ID NO: 4643 - protein, 20 aa, Artificial Sequence
  Synthetically generated peptide
  VARIANT (1)...(20): Xaa = Any Amino Acid
PGTCGEICAYAACXTXGXCX

SEQ ID NO: 4644 - protein, 19 aa, Artificial Sequence
  Synthetically generated peptide
  VARIANT (1)...(19): Xaa = Any Amino Acid
PGTCGEICAYAACXTXGCX

SEQ ID NO: 4645 - protein, 20 aa, Artificial Sequence
  Synthetically generated peptide
  VARIANT (1)...(20): Xaa = Any Amino Acid
PGTCGEICAYAACXTXGCXX

SEQ ID NO: 4646 - protein, 18 aa, Artificial Sequence
  Synthetically generated peptide
  VARIANT (1)...(18): Xaa = Any Amino Acid
PGTCGEICAYAACXTGXC

SEQ ID NO: 4647 - protein, 19 aa, Artificial Sequence
  Synthetically generated peptide
  VARIANT (1)...(19): Xaa = Any Amino Acid
PGTCGEICAYAACXTGXXC

SEQ ID NO: 4648 - protein, 20 aa, Artificial Sequence
  Synthetically generated peptide
  VARIANT (1)...(20): Xaa = Any Amino Acid
PGTCGEICAYAACXTGXXXC

SEQ ID NO: 4649 - protein, 20 aa, Artificial Sequence
  Synthetically generated peptide
  VARIANT (1)...(20): Xaa = Any Amino Acid
PGTCGEICAYAACXTGXXCX

SEQ ID NO: 4650 - protein, 19 aa, Artificial Sequence
  Synthetically generated peptide
  VARIANT (1)...(19): Xaa = Any Amino Acid
PGTCGEICAYAACXTGXCX

SEQ ID NO: 4651 - protein, 20 aa, Artificial Sequence
  Synthetically generated peptide
  VARIANT (1)...(20): Xaa = Any Amino Acid
PGTCGEICAYAACXTGXCXX

SEQ ID NO: 4652 - protein, 18 aa, Artificial Sequence
  Synthetically generated peptide
  VARIANT (1)...(18): Xaa = Any Amino Acid
PGTCGEICAYAACXTGCX

SEQ ID NO: 4653 - protein, 19 aa, Artificial Sequence
  Synthetically generated peptide
  VARIANT (1)...(19): Xaa = Any Amino Acid
PGTCGEICAYAACXTGCXX

SEQ ID NO: 4654 - protein, 20 aa, Artificial Sequence
  Synthetically generated peptide
  VARIANT (1)...(20): Xaa = Any Amino Acid
PGTCGEICAYAACXTGCXXX

SEQ ID NO: 4655 - protein, 17 aa, Artificial Sequence
  Synthetically generated peptide
  VARIANT (1)...(17): Xaa = Any Amino Acid
PGTCGEICAYAACTXGC

SEQ ID NO: 4656 - protein, 18 aa, Artificial Sequence
  Synthetically generated peptide
  VARIANT (1)...(18): Xaa = Any Amino Acid
PGTCGEICAYAACTXXGC

SEQ ID NO: 4657 - protein, 19 aa, Artificial Sequence
  Synthetically generated peptide
  VARIANT (1)...(19): Xaa = Any Amino Acid
PGTCGEICAYAACTXXXGC

SEQ ID NO: 4658 - protein, 20 aa, Artificial Sequence
  Synthetically generated peptide
  VARIANT (1)...(20): Xaa = Any Amino Acid
PGTCGEICAYAACTXXXXGC

SEQ ID NO: 4659 - protein, 20 aa, Artificial Sequence
  Synthetically generated peptide
  VARIANT (1)...(20): Xaa = Any Amino Acid
PGTCGEICAYAACTXXXGXC

SEQ ID NO: 4660 - protein, 20 aa, Artificial Sequence
  Synthetically generated peptide
  VARIANT (1)...(20): Xaa = Any Amino Acid
PGTCGEICAYAACTXXXGCX

SEQ ID NO: 4661 - protein, 19 aa, Artificial Sequence
  Synthetically generated peptide
  VARIANT (1)...(19): Xaa = Any Amino Acid
PGTCGEICAYAACTXXGXC

SEQ ID NO: 4662 - protein, 20 aa, Artificial Sequence
  Synthetically generated peptide
  VARIANT (1)...(20): Xaa = Any Amino Acid
PGTCGEICAYAACTXXGXXC

SEQ ID NO: 4663 - protein, 20 aa, Artificial Sequence
  Synthetically generated peptide
  VARIANT (1)...(20): Xaa = Any Amino Acid
PGTCGEICAYAACTXXGXCX

SEQ ID NO: 4664 - protein, 19 aa, Artificial Sequence
  Synthetically generated peptide
  VARIANT (1)...(19): Xaa = Any Amino Acid
PGTCGEICAYAACTXXGCX

SEQ ID NO: 4665 - protein, 20 aa, Artificial Sequence
  Synthetically generated peptide
  VARIANT (1)...(20): Xaa = Any Amino Acid
PGTCGEICAYAACTXXGCXX

SEQ ID NO: 4666 - protein, 18 aa, Artificial Sequence
  Synthetically generated peptide
  VARIANT (1)...(18): Xaa = Any Amino Acid
PGTCGEICAYAACTXGXC

SEQ ID NO: 4667 - protein, 19 aa, Artificial Sequence
  Synthetically generated peptide
  VARIANT (1)...(19): Xaa = Any Amino Acid
PGTCGEICAYAACTXGXXC

SEQ ID NO: 4668 - protein, 20 aa, Artificial Sequence
  Synthetically generated peptide
  VARIANT (1)...(20): Xaa = Any Amino Acid
PGTCGEICAYAACTXGXXXC

SEQ ID NO: 4669 - protein, 20 aa, Artificial Sequence
  Synthetically generated peptide
  VARIANT (1)...(20): Xaa = Any Amino Acid
PGTCGEICAYAACTXGXXCX

SEQ ID NO: 4670 - protein, 19 aa, Artificial Sequence
  Synthetically generated peptide
  VARIANT (1)...(19): Xaa = Any Amino Acid
PGTCGEICAYAACTXGXCX

SEQ ID NO: 4671 - protein, 20 aa, Artificial Sequence
  Synthetically generated peptide
  VARIANT (1)...(20): Xaa = Any Amino Acid
PGTCGEICAYAACTXGXCXX

SEQ ID NO: 4672 - protein, 18 aa, Artificial Sequence
  Synthetically generated peptide
  VARIANT (1)...(18): Xaa = Any Amino Acid
PGTCGEICAYAACTXGCX

SEQ ID NO: 4673 - protein, 19 aa, Artificial Sequence
  Synthetically generated peptide
  VARIANT (1)...(19): Xaa = Any Amino Acid
PGTCGEICAYAACTXGCXX

SEQ ID NO: 4674 - protein, 20 aa, Artificial Sequence
  Synthetically generated peptide
  VARIANT (1)...(20): Xaa = Any Amino Acid
PGTCGEICAYAACTXGCXXX

SEQ ID NO: 4675 - protein, 17 aa, Artificial Sequence
  Synthetically generated peptide
  VARIANT (1)...(17): Xaa = Any Amino Acid
PGTCGEICAYAACTGXC

SEQ ID NO: 4676 - protein, 18 aa, Artificial Sequence
  Synthetically generated peptide
  VARIANT (1)...(18): Xaa = Any Amino Acid
PGTCGEICAYAACTGXXC

SEQ ID NO: 4677 - protein, 19 aa, Artificial Sequence
  Synthetically generated peptide
  VARIANT (1)...(19): Xaa = Any Amino Acid
PGTCGEICAYAACTGXXXC

SEQ ID NO: 4678 - protein, 20 aa, Artificial Sequence
  Synthetically generated peptide
  VARIANT (1)...(20): Xaa = Any Amino Acid
PGTCGEICAYAACTGXXXXC

SEQ ID NO: 4679 - protein, 20 aa, Artificial Sequence
  Synthetically generated peptide
  VARIANT (1)...(20): Xaa = Any Amino Acid
PGTCGEICAYAACTGXXXCX

SEQ ID NO: 4680 - protein, 19 aa, Artificial Sequence
  Synthetically generated peptide
  VARIANT (1)...(19): Xaa = Any Amino Acid
PGTCGEICAYAACTGXXCX

SEQ ID NO: 4681 - protein, 20 aa, Artificial Sequence
  Synthetically generated peptide
  VARIANT (1)...(20): Xaa = Any Amino Acid
PGTCGEICAYAACTGXXCXX

SEQ ID NO: 4682 - protein, 18 aa, Artificial Sequence
  Synthetically generated peptide
  VARIANT (1)...(18): Xaa = Any Amino Acid
PGTCGEICAYAACTGXCX

SEQ ID NO: 4683 - protein, 19 aa, Artificial Sequence
  Synthetically generated peptide
  VARIANT (1)...(19): Xaa = Any Amino Acid
PGTCGEICAYAACTGXCXX

SEQ ID NO: 4684 - protein, 20 aa, Artificial Sequence
  Synthetically generated peptide
  VARIANT (1)...(20): Xaa = Any Amino Acid
PGTCGEICAYAACTGXCXXX

SEQ ID NO: 4685 - protein, 17 aa, Artificial Sequence
  Synthetically generated peptide
  VARIANT (1)...(17): Xaa = Any Amino Acid
PGTCGEICAYAACTGCX

SEQ ID NO: 4686 - protein, 18 aa, Artificial Sequence
  Synthetically generated peptide
  VARIANT (1)...(18): Xaa = Any Amino Acid
PGTCGEICAYAACTGCXX

SEQ ID NO: 4687 - protein, 19 aa, Artificial Sequence
  Synthetically generated peptide
  VARIANT (1)...(19): Xaa = Any Amino Acid
PGTCGEICAYAACTGCXXX

SEQ ID NO: 4688 - protein, 20 aa, Artificial Sequence
  Synthetically generated peptide
  VARIANT (1)...(20): Xaa = Any Amino Acid
PGTCGEICAYAACTGCXXXX

SEQ ID NO: 4689 - protein, 15 aa, Homo sapiens
PGTCEICAYAACTGC

SEQ ID NO: 4690 - protein, 15 aa, Artificial Sequence
  Synthetically generated peptide
PGTCEICASAACTGC

SEQ ID NO: 4691 - protein, 15 aa, Artificial Sequence
  Synthetically generated peptide
PGTCEICATAACTGC

SEQ ID NO: 4692 - protein, 15 aa, Artificial Sequence
  Synthetically generated peptide
PGTCEICANAACTGC

SEQ ID NO: 4693 - protein, 15 aa, Artificial Sequence
  Synthetically generated peptide
PGTCEICAQAACTGC

SEQ ID NO: 4694 - protein, 15 aa, Artificial Sequence
  Synthetically generated peptide
PGTCEICARAACTGC

SEQ ID NO: 4695 - protein, 15 aa, Artificial Sequence
  Synthetically generated peptide
PGTCEICAEAACTGC

SEQ ID NO: 4696 - protein, 15 aa, Artificial Sequence
  Synthetically generated peptide
PGTCEICADAACTGC

SEQ ID NO: 4697 - protein, 15 aa, Artificial Sequence
  Synthetically generated peptide
PGTCEICAGAACTGC

SEQ ID NO: 4698 - protein, 15 aa, Artificial Sequence
  Synthetically generated peptide
PGTCEICAAAACTGC

SEQ ID NO: 4699 - protein, 15 aa, Artificial Sequence
  Synthetically generated peptide
PGTCEICAMAACTGC

SEQ ID NO: 4700 - protein, 15 aa, Artificial Sequence
  Synthetically generated peptide
PGTCEICAIAACTGC

SEQ ID NO: 4701 - protein, 13 aa, Artificial Sequence
  Synthetically generated peptide
PGTCEICAACTGC

SEQ ID NO: 4702 - protein, 15 aa, Artificial Sequence
  Synthetically generated peptide
PGTCEICAVAACTGC

SEQ ID NO: 4703 - protein, 15 aa, Artificial Sequence
  Synthetically generated peptide
PGTCEICAHAACTGC

SEQ ID NO: 4704 - protein, 16 aa, Artificial Sequence
  Synthetically generated peptide
PGTCEGICAYAACTGC

SEQ ID NO: 4705 - protein, 16 aa, Artificial Sequence
  Synthetically generated peptide
PGTCEIGCAYAACTGC

SEQ ID NO: 4706 - protein, 16 aa, Artificial Sequence
  Synthetically generated peptide
PGTCEICGAYAACTGC

SEQ ID NO: 4707 - protein, 16 aa, Artificial Sequence
  Synthetically generated peptide
PGTCEICAGYAACTGC

SEQ ID NO: 4708 - protein, 16 aa, Artificial Sequence
  Synthetically generated peptide
PGTCEICAYGAACTGC

SEQ ID NO: 4709 - protein, 16 aa, Artificial Sequence
  Synthetically generated peptide
PGTCEICAYAGACTGC

SEQ ID NO: 4710 - protein, 16 aa, Artificial Sequence
  Synthetically generated peptide
PGTCEICAYAAGCTGC

SEQ ID NO: 4711 - protein, 16 aa, Artificial Sequence
  Synthetically generated peptide
PGTCEICAYAACGTGC

SEQ ID NO: 4712 - protein, 16 aa, Artificial Sequence
  Synthetically generated peptide
PGTCEICAYAACTGGC

SEQ ID NO: 4713 - protein, 16 aa, Artificial Sequence
  Synthetically generated peptide
PGTCAEICAYAACTGC

SEQ ID NO: 4714 - protein, 16 aa, Artificial Sequence
  Synthetically generated peptide
PGTCEAICAYAACTGC

SEQ ID NO: 4715 - protein, 16 aa, Artificial Sequence
  Synthetically generated peptide
PGTCEIACAYAACTGC

SEQ ID NO: 4716 - protein, 16 aa, Artificial Sequence
  Synthetically generated peptide
PGTCEICAAYAACTGC

SEQ ID NO: 4717 - protein, 16 aa, Artificial Sequence
  Synthetically generated peptide
PGTCEICAYAAACTGC

SEQ ID NO: 4718 - protein, 16 aa, Artificial Sequence
  Synthetically generated peptide
PGTCEICAYAACATGC

SEQ ID NO: 4719 - protein, 16 aa, Artificial Sequence
  Synthetically generated peptide
PGTCEICAYAACTAGC

SEQ ID NO: 4720 - protein, 16 aa, Artificial Sequence
  Synthetically generated peptide
PGTCEICAYAACTGAC

SEQ ID NO: 4721 - protein, 17 aa, Artificial Sequence
  Synthetically generated peptide
PGTCAEICAAYAACTGC

SEQ ID NO: 4722 - protein, 17 aa, Artificial Sequence
  Synthetically generated peptide
PGTCEAICAAYAACTGC

SEQ ID NO: 4723 - protein, 17 aa, Artificial Sequence
  Synthetically generated peptide
PGTCEIACAAYAACTGC

SEQ ID NO: 4724 - protein, 15 aa, Artificial Sequence
  Synthetically generated peptide
SHTCEICAFAACAGC

SEQ ID NO: 4725 - protein, 14 aa, Artificial Sequence
  Synthetically generated peptide
STCEICAYAACAGC

SEQ ID NO: 4726 - protein, 15 aa, Artificial Sequence
  Synthetically generated peptide
PNTCEICAYAACTGC

SEQ ID NO: 4727 - protein, 16 aa, Artificial Sequence
  Synthetically generated peptide
PDPCEICANAACTGCL

SEQ ID NO: 4728 - protein, 15 aa, Artificial Sequence
  Synthetically generated peptide
YDECEICMFAACTGC

SEQ ID NO: 4729 - protein, 13 aa, Artificial Sequence
  Synthetically generated peptide
VCEICAFAACTGC

SEQ ID NO: 4730 - protein, 15 aa, Artificial Sequence
  Synthetically generated peptide
PDVCDVCAFAACSGC

SEQ ID NO: 4731 - protein, 15 aa, Artificial Sequence
  Synthetically generated peptide
LDLCEICAFAACTGC

SEQ ID NO: 4732 - protein, 15 aa, Artificial Sequence
  Synthetically generated peptide
VDVCEICAFAACTGC

SEQ ID NO: 4733 - protein, 15 aa, Artificial Sequence
  Synthetically generated peptide
LDICEICAFAACTGC

SEQ ID NO: 4734 - protein, 20 aa, Didelphis virginiana
MNILLLSALCLCGLATLAGS

SEQ ID NO: 4735 - protein, 65 aa, Didelphis virginiana
VTVQDGDFSYPLESVKKLKDLQQSGMRSQTAHLCAHPNLPKDLKPICTRPDAAQAFQRLRAIAED

SEQ ID NO: 4736 - protein, 85 aa, Didelphis virginiana
MNILLLSALCLCGLATLAGSVTVQDGDFSYPLESVKKLKDLQQSGMRSQTAHLCAHPNLPKDLKPICTRPDAAQAFQRLRAIAED

SEQ ID NO: 4737 - protein, 15 aa, Didelphis virginiana
SHTCEICAFAACAGC

SEQ ID NO: 4738 - protein, 100 aa, Didelphis virginiana
MNILLLSALCLCGLATLAGSVTVQDGDFSYPLESVKKLKDLQQSGMRSQTAHLCAHPNLPKDLKPICTRPDAAQAFQRLRAIAEDSHTCEICAFAACAGC

SEQ ID NO: 4739 - protein, 80 aa, Didelphis virginiana
VTVQDGDFSYPLESVKKLKDLQQSGMRSQTAHLCAHPNLPKDLKPICTRPDAAQAFQRLRAIAEDSHTCEICAFAACAGC

SEQ ID NO: 4740 - protein, 35 aa, Didelphis virginiana
MNILLLSALCLCGLATLAGSSHTCEICAFAACAGC

SEQ ID NO: 4741 - protein, 21 aa, Sus scrofa
MNTFLFPTLCLLGVWAALAGG

SEQ ID NO: 4742 - protein, 73 aa, Sus scrofa
VTVKDGEFSFSLESVKKLKDLQELQKPRNPRNLDGPIIPVLCNSPKFPEELKPICQKPNAEEILERLETIAQD

SEQ ID NO: 4743 - protein, 94 aa, Sus scrofa
MNTFLFPTLCLLGVWAALAGGVTVKDGEFSFSLESVKKLKDLQELQKPRNPRNLDGPIIPVLCNSPKFPEELKPICQKPNAEEILERLETIAQD

SEQ ID NO: 4744 - protein, 15 aa, Sus scrofa
PSTCEICAYAACAGC

SEQ ID NO: 4745 - protein, 109 aa, Sus scrofa
MNTFLFPTLCLLGVWAALAGGVTVKDGEFSFSLESVKKLKDLQELQKPRNPRNLDGPIIPVLCNSPKFPEELKPICQKPNAEEILERLETIAQDPSTCEICAYAACAGC

SEQ ID NO: 4746 - protein, 88 aa, Sus scrofa
VTVKDGEFSFSLESVKKLKDLQELQKPRNPRNLDGPIIPVLCNSPKFPEELKPICQKPNAEEILERLETIAQDPSTCEICAYAACAGC

SEQ ID NO: 4747 - protein, 36 aa, Sus scrofa
MNTFLFPTLCLLGVWAALAGGPSTCEICAYAACAGC

SEQ ID NO: 4748 - protein, 20 aa, Cavia porcellus
MNTFLLSALCLGAWAALVGA

SEQ ID NO: 4749 - protein, 72 aa, Cavia porcellus
VTVQDGDFSFSLESVKKLKDLQEAPESKVQGRRKFVAPPLCSFSGFPEELRPVCKEPNSQDILNRLAVIAQD

SEQ ID NO: 4750 - protein, 92 aa, Cavia porcellus
MNTFLLSALCLGAWAALVGAVTVQDGDFSFSLESVKKLKDLQEAPESKVQGRRKFVAPPLCSFSGFPEELRPVCKEPNSQDILNRLAVIAQD

SEQ ID NO: 4751 - protein, 15 aa, Cavia porcellus
PSTCEICAYAACAGC

SEQ ID NO: 4752 - protein, 107 aa, Cavia porcellus
MNTFLLSALCLGAWAALVGAVTVQDGDFSFSLESVKKLKDLQEAPESKVQGRRKFVAPPLCSFSGFPEELRPVCKEPNSQDILNRLAVIAQDPSTCEICAYAACAGC

SEQ ID NO: 4753 - protein, 87 aa, Cavia porcellus
VTVQDGDFSFSLESVKKLKDLQEAPESKVQGRRKFVAPPLCSFSGFPEELRPVCKEPNSQDILNRLAVIAQDPSTCEICAYAACAGC

SEQ ID NO: 4754 - protein, 35 aa, Cavia porcellus
MNTFLLSALCLGAWAALVGAPSTCEICAYAACAGC

SEQ ID NO: 4755 - protein, 20 aa, Cavia porcellus
MNTFLLSALCLGAWAALVGA

SEQ ID NO: 4756 - protein, 99 aa, Cavia porcellus
VTVQDGDFSFSLESVKKLKDLQEAPESKVQGRRKFVAPPLCSFSGFPEELRPVCKEPNSQDILNRLELPSERLAGVVCRHSTFREDTPGGWGRKCPRFG

SEQ ID NO: 4757 - protein, 119 aa, Cavia porcellus
MNTFLLSALCLGAWAALVGAVTVQDGDFSFSLESVKKLKDLQEAPESKVQGRRKFVAPPLCSFSGFPEELRPVCKEPNSQDILNRLELPSERLAGVVCRHSTFREDTPGGWGRKCPRFG

SEQ ID NO: 4758 - protein, 21 aa, Rattus norvegicus
MNAWLLSVLCLLGALAVLVEG

SEQ ID NO: 4759 - protein, 79 aa, Rattus norvegicus
VTVQDGDLSFPLESVKQLKHLREVQEPTLMSHKKFALRLPKPVAPELCSQSAFPEALRPLCEKPNAEEILQRLEAIAQD

SEQ ID NO: 4760 - protein, 100 aa, Rattus norvegicus
MNAWLLSVLCLLGALAVLVEGVTVQDGDLSFPLESVKQLKHLREVQEPTLMSHKKFALRLPKPVAPELCSQSAFPEALRPLCEKPNAEEILQRLEAIAQD

SEQ ID NO: 4761 - protein, 15 aa, Rattus norvegicus
PNTCEICAYAACTGC

SEQ ID NO: 4762 - protein, 115 aa, Rattus norvegicus
MNAWLLSVLCLLGALAVLVEGVTVQDGDLSFPLESVKQLKHLREVQEPTLMSHKKFALRLPKPVAPELCSQSAFPEALRPLCEKPNAEEILQRLEAIAQDPNTCEICAYAACTGC

SEQ ID NO: 4763 - protein, 94 aa, Rattus norvegicus
VTVQDGDLSFPLESVKQLKHLREVQEPTLMSHKKFALRLPKPVAPELCSQSAFPEALRPLCEKPNAEEILQRLEAIAQDPNTCEICAYAACTGC

SEQ ID NO: 4764 - protein, 36 aa, Rattus norvegicus
MNAWLLSVLCLLGALAVLVEGPNTCEICAYAACTGC

SEQ ID NO: 4765 - protein, 21 aa, Notomys alexis
MNACVLSVLCLLGAVAVLVEG

SEQ ID NO: 4766 - protein, 79 aa, Notomys alexis
VTVQDGDLSFPLESVKQLKDLREVQEPRLASHKKFAPRLLKPVAPQLCSQSAFPEALRPLCEKPNAEEILQRLEAIAQD

SEQ ID NO: 4767 - protein, 100 aa, Notomys alexis
MNACVLSVLCLLGAVAVLVEGVTVQDGDLSFPLESVKQLKDLREVQEPRLASHKKFAPRLLKPVAPQLCSQSAFPEALRPLCEKPNAEEILQRLEAIAQD

SEQ ID NO: 4768 - protein, 15 aa, Notomys alexis
PNTCEICAYAACTGC

SEQ ID NO: 4769 - protein, 115 aa, Notomys alexis
MNACVLSVLCLLGAVAVLVEGVTVQDGDLSFPLESVKQLKDLREVQEPRLASHKKFAPRLLKPVAPQLCSQSAFPEALRPLCEKPNAEEILQRLEAIAQDPNTCEICAYAACTGC

SEQ ID NO: 4770 - protein, 94 aa, Notomys alexis
VTVQDGDLSFPLESVKQLKDLREVQEPRLASHKKFAPRLLKPVAPQLCSQSAFPEALRPLCEKPNAEEILQRLEAIAQDPNTCEICAYAACTGC

SEQ ID NO: 4771 - protein, 36 aa, Notomys alexis
MNACVLSVLCLLGAVAVLVEGPNTCEICAYAACTGC

SEQ ID NO: 4772 - protein, 21 aa, Homo sapiens
MNAFLLFALCLLGAWAALAGG

SEQ ID NO: 4773 - protein, 79 aa, Homo sapiens
VTVQDGNFSFSLESVKKLKDLQEPQEPRVGKLRNFAPIPGEPVVPILCSNPNFPEELKPLCKEPNAQEILQRLEEIAED

SEQ ID NO: 4774 - protein, 100 aa, Homo sapiens
MNAFLLFALCLLGAWAALAGGVTVQDGNFSFSLESVKKLKDLQEPQEPRVGKLRNFAPIPGEPVVPILCSNPNFPEELKPLCKEPNAQEILQRLEEIAED

SEQ ID NO: 4775 - protein, 15 aa, Homo sapiens
PGTCEICAYAACTGC

SEQ ID NO: 4776 - protein, 115 aa, Homo sapiens
MNAFLLFALCLLGAWAALAGGVTVQDGNFSFSLESVKKLKDLQEPQEPRVGKLRNFAPIPGEPVVPILCSNPNFPEELKPLCKEPNAQEILQRLEEIAEDPGTCEICAYAACTGC

SEQ ID NO: 4777 - protein, 94 aa, Homo sapiens
VTVQDGNFSFSLESVKKLKDLQEPQEPRVGKLRNFAPIPGEPVVPILCSNPNFPEELKPLCKEPNAQEILQRLEEIAEDPGTCEICAYAACTGC

SEQ ID NO: 4778 - protein, 36 aa, Homo sapiens
MNAFLLFALCLLGAWAALAGGPGTCEICAYAACTGC

SEQ ID NO: 4779 - protein, 21 aa, Pan troglodytes (chimpanzee)
MNAFLLSALCLLGAWAALAGG

SEQ ID NO: 4780 - protein, 171 aa, Pan troglodytes (chimpanzee)
VTVQAPMVFLELHTHFLHSPYNMQNLRVPECPASRSQARTWGLNSAPHSAPQWIAWLPYATNTACEHHWAGPGPARGAQPGSRLQPGLMLWASLFQDGNFSFSLESVKKLKDLQEPQEPRVGKLRKFAPIPGEPVVPILCSNPKFPEELKPLCKEPNAQEILQRLEEIAED

SEQ ID NO: 4781 - protein, 147 aa, Pan troglodytes (chimpanzee)
MNAFLLSALCLLGAWAALAGGVTVQAPMVFLELHTHFLHSPYNMQNLRVPECPASRSQARTWGLNSAPHSAPQWIAWLPYATNTACEHHWAGPGPARGAQPGSRLQPGLMLWASLFQDGNFSFSLESVKKLKDLQEPQEPRVGKLRK

SEQ ID NO: 4782 - protein, 15 aa, Pan troglodytes (chimpanzee)
PGTCEICAYAACTGC

SEQ ID NO: 4783 - protein, 162 aa, Pan troglodytes (chimpanzee)
MNAFLLSALCLLGAWAALAGGVTVQAPMVFLELHTHFLHSPYNMQNLRVPECPASRSQARTWGLNSAPHSAPQWIAWLPYATNTACEHHWAGPGPARGAQPGSRLQPGLMLWASLFQDGNFSFSLESVKKLKDLQEPQEPRVGKLRKFAPIPGEPVVPILCS

SEQ ID NO: 4784 - protein, 155 aa, Pan troglodytes (chimpanzee)
VTVQAPMVFLELHTHFLHSPYNMQNLRVPECPASRSQARTWGLNSAPHSAPQWIAWLPYATNTACEHHWAGPGPARGAQPGSRLQPGLMLWASLFQDGNFSFSLESVKKLKDLQEPQEPRVGKLRKFAPIPGEPVVPILCSNPKFPEELKPLCKE

SEQ ID NO: 4785 - protein, 36 aa, Pan troglodytes (chimpanzee)
MNAFLLSALCLLGAWAALAGGPGTCEICAYAACTGC

SEQ ID NO: 4786 - protein, 21 aa, Mus musculus (house mouse)
MNACVLSVLCLLGALAVLVEG

SEQ ID NO: 4787 - protein, 80 aa, Mus musculus (house mouse)
VTVQDGDLSFPLESVKKLKGLREVQEPRLVSHKKFAPRLLQPVAPQLCSSHSALPEALRPVCEKPNAEEILQRLEAIAQD

SEQ ID NO: 4788 - protein, 101 aa, Mus musculus (house mouse)
MNACVLSVLCLLGALAVLVEGVTVQDGDLSFPLESVKKLKGLREVQEPRLVSHKKFAPRLLQPVAPQLCSSHSALPEALRPVCEKPNAEEILQRLEAIAQD

SEQ ID NO: 4789 - protein, 15 aa, Mus musculus (house mouse)
PNTCEICAYAACTGC

SEQ ID NO: 4790 - protein, 116 aa, Mus musculus (house mouse)
MNACVLSVLCLLGALAVLVEGVTVQDGDLSFPLESVKKLKGLREVQEPRLVSHKKFAPRLLQPVAPQLCSSHSALPEALRPVCEKPNAEEILQRLEAIAQDPNTCEICAYAACTGC

SEQ ID NO: 4791 - protein, 95 aa, Mus musculus (house mouse)
VTVQDGDLSFPLESVKKLKGLREVQEPRLVSHKKFAPRLLQPVAPQLCSSHSALPEALRPVCEKPNAEEILQRLEAIAQDPNTCEICAYAACTGC

SEQ ID NO: 4792 - protein, 36 aa, Mus musculus (house mouse)
MNACVLSVLCLLGALAVLVEGPNTCEICAYAACTGC

SEQ ID NO: 4793 - protein, 21 aa, Canis familiaris
MNTFLLSALCLLGAWAVLAEG

SEQ ID NO: 4794 - protein, 75 aa, Canis familiaris
VTVQDGDFSFPLESVKKLKALGELQERSMRSGRKRGGPALPGACSHLQFPEELRPLCKEPNAPEILGRLASIAQD

SEQ ID NO: 4795 - protein, 96 aa, Canis familiaris
MNTFLLSALCLLGAWAVLAEGVTVQDGDFSFPLESVKKLKALGELQERSMRSGRKRGGPALPGACSHLQFPEELRPLCKEPNAPEILGRLASIAQD

SEQ ID NO: 4796 - protein, 15 aa, Canis familiaris
PRSCEICAFAACAGC

SEQ ID NO: 4797 - protein, 111 aa, Canis familiaris
MNTFLLSALCLLGAWAVLAEGVTVQDGDFSFPLESVKKLKALGELQERSMRSGRKRGGPALPGACSHLQFPEELRPLCKEPNAPEILGRLASIAQDPRSCEICAFAACAGC

SEQ ID NO: 4798 - protein, 90 aa, Canis familiaris
VTVQDGDFSFPLESVKKLKALGELQERSMRSGRKRGGPALPGACSHLQFPEELRPLCKEPNAPEILGRLASIAQDPRSCEICAFAACAGC

SEQ ID NO: 4799 - protein, 36 aa, Canis familiaris
MNTFLLSALCLLGAWAVLAEGPRSCEICAFAACAGC

SEQ ID NO: 4800 - protein, 21 aa, Bos taurus
MNTFLLSALCLLGAWATLTGG

SEQ ID NO: 4801 - protein, 76 aa, Bos taurus
VIVKDGDFSFSLESVKKLKDLQELQELQEPRIPRNPGGHIASNLCSLPTFPEELKPLCKESNAQEILDRLGAIAAD

SEQ ID NO: 4802 - protein, 97 aa, Bos taurus
MNTFLLSALCLLGAWATLTGGVIVKDGDFSFSLESVKKLKDLQELQELQEPRIPRNPGGHIASNLCSLPTFPEELKPLCKESNAQEILDRLGAIAAD

SEQ ID NO: 4803 - protein, 15 aa, Bos taurus
PSTCEICAYAACAGC

SEQ ID NO: 4804 - protein, 112 aa, Bos taurus
MNTFLLSALCLLGAWATLTGGVIVKDGDFSFSLESVKKLKDLQELQELQEPRIPRNPGGHIASNLCSLPTFPEELKPLCKESNAQEILDRLGAIAADPSTCEICAYAACAGC

SEQ ID NO: 4805 - protein, 91 aa, Bos taurus
VIVKDGDFSFSLESVKKLKDLQELQELQEPRIPRNPGGHIASNLCSLPTFPEELKPLCKESNAQEILDRLGAIAADPSTCEICAYAACAGC

SEQ ID NO: 4806 - protein, 36 aa, Bos taurus
MNTFLLSALCLLGAWATLTGGPSTCEICAYAACAGC

SEQ ID NO: 4807 - protein, 19 aa, Gallus gallus
MRGLVSFTVLALLLLVHSS

SEQ ID NO: 4808 - protein, 75 aa, Gallus gallus
QAVYVQDGNLKFSLESVKKLKELMDENKVINPRIVVAKAGYSPCQDKALPEEFQPVCKREDAPMIFERLCLVASE

SEQ ID NO: 4809 - protein, 94 aa, Gallus gallus
MRGLVSFTVLALLLLVHSSQAVYVQDGNLKFSLESVKKLKELMDENKVINPRIVVAKAGYSPCQDKALPEEFQPVCKREDAPMIFERLCLVASE

SEQ ID NO: 4810 - protein, 16 aa, Gallus gallus
ADLCEICANAACSGCF

SEQ ID NO: 4811 - protein, 110 aa, Gallus gallus
MRGLVSFTVLALLLLVHSSQAVYVQDGNLKFSLESVKKLKELMDENKVINPRIVVAKAGYSPCQDKALPEEFQPVCKREDAPMIFERLCLVASEADLCEICANAACSGCF

SEQ ID NO: 4812 - protein, 91 aa, Gallus gallus
QAVYVQDGNLKFSLESVKKLKELMDENKVINPRIVVAKAGYSPCQDKALPEEFQPVCKREDAPMIFERLCLVASEADLCEICANAACSGCF

SEQ ID NO: 4813 - protein, 35 aa, Gallus gallus
MRGLVSFTVLALLLLVHSSADLCEICANAACSGCF

SEQ ID NO: 4814 - protein, 16 aa, Tetraodon nigroviridis
MRAAGVLLALLLCVYG

SEQ ID NO: 4815 - protein, 76 aa, Tetraodon nigroviridis
GSAAVQVKVGERSFPLEAVKQLKQLFNLDDDTSPHLMEASVVAVCAHPLLPQIFRPVCQGKSTDIVLSRLVYAITP

SEQ ID NO: 4816 - protein, 92 aa, Tetraodon nigroviridis
MRAAGVLLALLLCVYGGSAAVQVKVGERSFPLEAVKQLKQLFNLDDDTSPHLMEASVVAVCAHPLLPQIFRPVCQGKSTDIVLSRLVYAITP

SEQ ID NO: 4817 - protein, 17 aa, Tetraodon nigroviridis
LDPCEICANPSCFGCLS

SEQ ID NO: 4818 - protein, 126 aa, Tetraodon nigroviridis
MRAAGVLLALLLCVYGGSAAVQVKVGERSFPLEAVKQLKQLFNLDDDTSPHLMEASVVAVCAHPLLPQIFRPVCQGKSTDIVLSRLVYAITPLDPCEICANPSCFGCLSLDPCEICANPSCFGCLS

SEQ ID NO: 4819 - protein, 110 aa, Tetraodon nigroviridis
GSAAVQVKVGERSFPLEAVKQLKQLFNLDDDTSPHLMEASVVAVCAHPLLPQIFRPVCQGKSTDIVLSRLVYAITPLDPCEICANPSCFGCLSLDPCEICANPSCFGCLS

SEQ ID NO: 4820 - protein, 33 aa, Tetraodon nigroviridis
MRAAGVLLALLLCVYGLDPCEICANPSCFGCLS

SEQ ID NO: 4821 - protein, 18 aa, Tetraodon nigroviridis
MKATVATVALLVLALSWP

SEQ ID NO: 4822 - protein, 76 aa, Tetraodon nigroviridis
GNEAVEVQENGLTFSLEAVKRLHELAQSSVGAAAASPRLRASSVFLCGDPLLPQEFLPLCRQRGASASVARLAMVP

SEQ ID NO: 4823 - protein, 94 aa, Tetraodon nigroviridis
MKATVATVALLVLALSWPGNEAVEVQENGLTFSLEAVKRLHELAQSSVGAAAASPRLRASSVFLCGDPLLPQEFLPLCRQRGASASVARLAMVP

SEQ ID NO: 4824 - protein, 15 aa, Tetraodon nigroviridis
LDICEICAFAACTGC

SEQ ID NO: 4825 - protein, 109 aa, Tetraodon nigroviridis
MKATVATVALLVLALSWPGNEAVEVQENGLTFSLEAVKRLHELAQSSVGAAAASPRLRASSVFLCGDPLLPQEFLPLCRQRGASASVARLAMVPLDICEICAFAACTGC

SEQ ID NO: 4826 - protein, 91 aa, Tetraodon nigroviridis
GNEAVEVQENGLTFSLEAVKRLHELAQSSVGAAAASPRLRASSVFLCGDPLLPQEFLPLCRQRGASASVARLAMVPLDICEICAFAACTGC

SEQ ID NO: 4827 - protein, 33 aa, Tetraodon nigroviridis
MKATVATVALLVLALSWPLDICEICAFAACTGC

SEQ ID NO: 4828 - protein, 20 aa, Eel guanylin
MKAVLSITFLALAVSLLCDA

SEQ ID NO: 4829 - protein, 74 aa, Eel guanylin
VQVKEREFTFSLESVRQLKDLMDSDLAGKESPRLAKTSTAIVCNDPGLPEEFLPLCQSEGAGMSLARLAFIGNN

SEQ ID NO: 4830 - protein, 94 aa, Eel guanylin
MKAVLSITFLALAVSLLCDAVQVKEREFTFSLESVRQLKDLMDSDLAGKESPRLAKTSTAIVCNDPGLPEEFLPLCQSEGAGMSLARLAFIGNN

SEQ ID NO: 4831 - protein, 15 aa, Eel guanylin
YDECEICMFAACTGC

SEQ ID NO: 4832 - protein, 109 aa, Eel guanylin
MKAVLSITFLALAVSLLCDAVQVKEREFTFSLESVRQLKDLMDSDLAGKESPRLAKTSTAIVCNDPGLPEEFLPLCQSEGAGMSLARLAFIGNNYDECEICMFAACTGC

SEQ ID NO: 4833 - protein, 89 aa, Eel guanylin
VQVKEREFTFSLESVRQLKDLMDSDLAGKESPRLAKTSTAIVCNDPGLPEEFLPLCQSEGAGMSLARLAFIGNNYDECEICMFAACTGC

SEQ ID NO: 4834 - protein, 35 aa, Eel guanylin
MKAVLSITFLALAVSLLCDAYDECEICMFAACTGC

SEQ ID NO: 4835 - protein, 6 aa, Artificial Sequence
  Synthetically generated peptide
  VARIANT 4, 6: Xaa = Arg or Lys
  VARIANT 5: Xaa = Trp or Ile
RYYXXX

SEQ ID NO: 4836 - protein, 6 aa, Artificial Sequence
  Synthetically generated peptide
KYYRWR

SEQ ID NO: 4837 - protein, 6 aa, Artificial Sequence
  Synthetically generated peptide
RYYRWR

SEQ ID NO: 4838 - protein, 6 aa, Artificial Sequence
  Synthetically generated peptide
KWRYYR

SEQ ID NO: 4839 - protein, 6 aa, Artificial Sequence
  Synthetically generated peptide
RYYRWK

SEQ ID NO: 4840 - protein, 6 aa, Artificial Sequence
  Synthetically generated peptide
RYYRIK

SEQ ID NO: 4841 - protein, 6 aa, Artificial Sequence
  Synthetically generated peptide
RYYRIR

SEQ ID NO: 4842 - protein, 6 aa, RYYKIK
RYYKIK

SEQ ID NO: 4843 - protein, 6 aa, Artificial Sequence
  Synthetically generated peptide
RYYKIR

SEQ ID NO: 4844 - protein, 6 aa, Artificial Sequence
  Synthetically generated peptide
RYYKWR

SEQ ID NO: 4845 - protein, 6 aa, Artificial Sequence
  Synthetically generated peptide
RYYKWK

SEQ ID NO: 4846 - protein, 6 aa, Artificial Sequence
  Synthetically generated peptide
RYYRWR

SEQ ID NO: 4847 - protein, 6 aa, Artificial Sequence
  Synthetically generated peptide
RYYRWK

SEQ ID NO: 4848 - protein, 6 aa, Artificial Sequence
  Synthetically generated peptide
RYYRIK

SEQ ID NO: 4849 - protein, 6 aa, Artificial Sequence
  Synthetically generated peptide
RYYKWR

SEQ ID NO: 4850 - protein, 6 aa, Artificial Sequence
  Synthetically generated peptide
RYYKWK

SEQ ID NO: 4851 - protein, 6 aa, Artificial Sequence
  Synthetically generated peptide
RYYRWK

SEQ ID NO: 4852 - protein, 6 aa, Artificial Sequence
  Synthetically generated peptide
KYYRWK

SEQ ID NO: 4853 - protein, 27 aa, Artificial Sequence
  Synthetically generated peptide
HAEGTFTSDVSYLEGQAAKEFIAWLVK

1-47. (canceled)

48. A method for increasing GC-C receptor activity, the method comprising administering a composition comprising a guanylin potentiating agent

49. A method for treating a disorder ameliorated by increasing cGMP levels, the method comprising administering a composition comprising a guanylin potentiating agent.

50. The method of claim 49 wherein the disorder is selected from: congestive heart failure, hypertension, a gastrointestinal disorder, and obesity.

51. The method of claim 50 wherein the gastrointestinal disorder is selected from the group consisting of: a gastrointestinal motility disorder, chronic intestinal pseudo-obstruction, colonic pseudo-obstruction, Crohn's disease, duodenogastric reflux, dyspepsia, functional dyspepsia, nonulcer dyspepsia, a functional gastrointestinal disorder, functional heartburn, gastroesophageal reflux disease (GERD), gastroparesis, inflammatory bowel disease, irritable bowel syndrome, post-operative ileus, ulcerative colitis, and constipation.

52. The method of claim 49 further comprising administering guanylin or a biologically active variant or fragment thereof.

53. The method of claim 49 further comprising administering a GC-C receptor agonist.

54. The method of claim 49 wherein the guanylin potentiating agent is a chymotrypsin inhibitor.

55. A pharmaceutical composition comprising a guanylin potentiating agent inhibitor and a pharmaceutically acceptable carrier.

56. The pharmaceutical composition of claim 55 further comprising guanylin or a biologically active variant or fragment thereof.

57. A pharmaceutical composition comprising at least two of:
(a) an agent that stimulates the production of cAMP
(b) an agent that inhibits the degradation of a cyclic nucleotide; and
(c) a guanylin potentiating agent.

58. The pharmaceutical composition of claim 57 wherein (a) is glucagon-like peptide 1.

59. The pharmaceutical composition of claim 57 wherein (b) is a phosphodiesterase inhibitor.

60. The method of claim 52 wherein the guanylin or biologically active variant or fragment thereof is a polypeptide comprising the amino acid sequence:
A′-B′-C′ wherein:
A′ is an amino acid sequence comprising a pre sequence depicted in FIG. 6 or is missing;
B′ is an amino acid sequence comprising a pro sequence depicted in FIG. 6 or is missing;
C′ is an amino acid sequence comprising a GC-C receptor agonist polypeptide amino acid sequence.

61. The method of claim 60 wherein C′ comprises an amino acid sequence selected from:

| | |
|---|---|
| PGTCEICASAACTGC | (SEQ ID NO: 4690) |
| PGTCEICATAACTGC | (SEQ ID NO: 4691) |
| PGTCEICANAACTGC | (SEQ ID NO: 4692) |
| PGTCEICAQAACTGC | (SEQ ID NO: 4693) |
| PGTCEICARAACTGC | (SEQ ID NO: 4694) |
| PGTCEICAEAACTGC | (SEQ ID NO: 4695) |
| PGTCEICADAACTGC | (SEQ ID NO: 4696) |
| PGTCEICAGAACTGC | (SEQ ID NO: 4697) |
| PGTCEICAAAACTGC | (SEQ ID NO: 4698) |
| PGTCEICAMAACTGC | (SEQ ID NO: 4699) |
| PGTCEICAIAACTGC | (SEQ ID NO: 4700) |
| PGTCEICALAACTGG | (SEQ ID NO: 4701) |
| PGTCEICAVAACTGC | (SEQ ID NO: 4702) |
| PGTCEICAHAACTGC | (SEQ ID NO: 4703) |
| PGTGEGICAYAACTGC | (SEQ ID NO: 4704) |
| PGTCEIGCAYAACTGC | (SEQ ID NO: 4705) |
| PGTCEICGAYAACTGC | (SEQ ID NO: 4706) |
| PGTGEICAGYAACTGC | (SEQ ID NO: 4707) |
| PGTCEICAYGAACTGC | (SEQ ID NO: 4708) |
| PGTCEICAYAGACTGC | (SEQ ID NO: 4709) |
| PGTCEICAYAAGCTGC | (SEQ ID NO: 4710) |
| PGTCEICAYAACGTGC | (SEQ ID NO: 4711) |
| PGTCEICAYAACTGGC | (SEQ ID NO: 4712) |
| PGTCAEICAYAACTGC | (SEQ ID NO: 4713) |
| PGTCEAICAYAACTGC | (SEQ ID NO: 4714) |
| PGTCEIACAYAACTGC | (SEQ ID NO: 4715) |
| PGTCEICAAYAACTGC | (SEQ ID NO: 4716) |
| PGTCEICAYAAACTGC | (SEQ ID NO: 4717) |
| PGTCEICAYAACATGC | (SEQ ID NO: 4718) |
| PGTCEICAYAACTAGC | (SEQ ID NO: 4719) |
| PGTCEICAYAACTGAC | (SEQ ID NO: 4720) |
| PGTCAEICAAYAACTGC | (SEQ ID NO: 4721) |
| PGTCEAICAAYAACTGC | (SEQ ID NO: 4722) |
| and | |
| PGTCEIACAAYAACTGC. | (SEQ ID NO: 4723) |

62. The method of claim 60 wherein C′ comprises an amino acid sequence selected from the processed active peptide sequences shown in FIG. 6.

63. The method of claim 60 wherein A′ is missing and B′ is an amino acid sequence comprising a pro sequence depicted in FIG. 6.

64. The pharmaceutical composition of claim 56 wherein the guanylin or biologically active variant or fragment thereof comprises the amino acid sequence:
A′-B′-C′ wherein:
A′ is an amino acid sequence comprising a pre sequence depicted in FIG. 6 or is missing;
B′ is an amino acid sequence comprising a pro sequence depicted in FIG. 6 or is missing;
C′ is an amino acid sequence comprising a GC-C receptor agonist polypeptide amino acid sequence.

65. The composition of claim 64 wherein C′ comprises an amino acid sequence selected from:

| | |
|---|---|
| PGTCEICASAACTGC | (SEQ ID NO: 4690) |
| PGTCEICATAACTGC | (SEQ ID NO: 4691) |
| PGTCEICANAACTGC | (SEQ ID NO: 4692) |
| PGTCEICAQAACTGC | (SEQ ID NO: 4693) |
| PGTCEICARAACTGC | (SEQ ID NO: 4694) |
| PGTCEICAEAACTGC | (SEQ ID NO: 4695) |
| PGTCEICADAACTGC | (SEQ ID NO: 4696) |
| PGTCEICAGAACTGC | (SEQ ID NO: 4697) |
| PGTCEICAAAACTGC | (SEQ ID NO: 4698) |
| PGTCEICAMAACTGC | (SEQ ID NO: 4699) |
| PGTCEICAIAACTGC | (SEQ ID NO: 4700) |
| PGTCEICALAACTGC | (SEQ ID NO: 4701) |
| PGTCEICAVAACTGC | (SEQ ID NO: 4702) |
| PGTCEICAHAACTGC | (SEQ ID NO: 4703) |
| PGTCEGICAYAACTGC | (SEQ ID NO: 4704) |
| PGTCEIGCAYAACTGC | (SEQ ID NO: 4705) |
| PGTCEICGAYAACTGC | (SEQ ID NO: 4706) |
| PGTCEICAGYAACTGC | (SEQ ID NO: 4707) |
| PGTCEICAYGAACTGC | (SEQ ID NO: 4708) |
| PGTCEICAYAGACTGC | (SEQ ID NO: 4709) |
| PGTCEICAYAAGCTGC | (SEQ ID NO: 4710) |
| PGTCEICAYAACGTGC | (SEQ ID NO: 4711) |
| PGTCEICAYAACTGGC | (SEQ ID NO: 4712) |
| PGTCAEICAYAACTGC | (SEQ ID NO: 4713) |
| PGTCEAICAYAACTGC | (SEQ ID NO: 4714) |
| PGTCEIACAYAACTGC | (SEQ ID NO: 4715) |
| PGTCEICAAYAACTGC | (SEQ ID NO: 4716) |
| PGTCEICAYAAACTGC | (SEQ ID NO: 4717) |
| PGTCEICAYAACATGC | (SEQ ID NO: 4718) |
| PGTCEICAYAACTAGC | (SEQ ID NO: 4719) |
| PGTCEICAYAACTGAC | (SEQ ID NO: 4720) |
| PGTCAEICAAYAACTGC | (SEQ ID NO: 4721) |
| PGTCEAICAAYAACTGC | (SEQ ID NO: 4722) |
| and | |
| PGTCEIACAAYAACTGC. | (SEQ ID NO: 4723) |

66. The composition of claim 64 wherein C′ comprises an amino acid sequence selected from the processed active peptide sequences shown in FIG. 6.

67. The composition of claim 64 wherein A′ is missing and B′ is an amino acid sequence comprising a pro sequence depicted in FIG. 6.
